United States Patent Application Publication US 2009/0215711 A1 - sequence listing, part 3

SEQ ID NO: 227 - DNA, 292299 bp, Homo Sapiens
atgggcagcagcggcaggtggccttggcttttgctgcagccgtcaacgacctatcatcggggtcctgcgtaaggtccggctggctgggacttggctgtgggtgggatggactggctgccggaccgagtgccctgcagttggtaggagtatgaggcagagtgatgcacacccgggcgcccagcatcgttctaattgccggagacattgcctcagactgtgcgctgctagaggctgcgttcctgagcaggaagcccgtttcctgggattggaactacccttcttggccagcgggaagtccccaaggacggagtcgaaaggtcaaatcttatctgtcagtgctgtgtgacagcatcgcaacgggatctgcagaacctgaactcggtatcaaatctattgggagggaggggaacgtgtccgggcaggcgctggggtcgggtggcaaaactggggtgaatttgtagaatttgggaaagggtcattgacatcttaaaataggtggtcgtttggagcaagaatgctcgaaaggggtgagggtaggttaggctctctagtgctgggggaaaacaaaatgtggaaggattggtggaaaccagacctttaagatttatattatgatttgagatttatatgattccatctaggccagatttaaaaaaatatttgacatccccatttctggaatgtaggagataaaggcactaagacgaaggaaatggtagttgtgctgtgtgtattacactgaagaacaaatatttgcaggataaaattaatttggacatttggctggacactgctcggtatgggtccagtttagttggacctcgagcagaagactggctgttgccctgttgtgtaccacaatctttggtttccagtgctgtgttgaaaagagcactaggcttagaatcagaaaactcaggcttaagtgttgactcttccactcataatgtttgaacgagacatgtcacttaaaattctgtctcagattcctcatcactgaaatggagctaataatgtgcactttacaagattgttcttaggattatatatcacgaaagtgtttccaagctctaaaattctacataaatgtaaaatgcatgttgcttgtaccattggttttgggactagtcttataaatttcttaatgatatatggtgttttatctccttcctagaagagatggaaagattctgaagggcagaaacagtttttcttttgtatcttccttccatatgacaaaaagctaagcatgcagaagggactcgatacatgcttgatgaatgaatgaaatgtgaaagaccgtacagtttgagaatcatactgagaataataaatcagaagagggagagagatctcaaaattaaatatttgttggatatatacatgtaaatacatatgtccagtcttctttaagttcaaaaaaatacatatataatgtgtgtatatttatctatgcagtatattatatataaatagagagtgggagagagacctcgagaatggaatacatccctttttcttgggaagaagcaatgtggtgtttttctgttcccaattaaaccactcttctataagtatatcatttaggtgatagaagtaacattgtttaaattaacattcaagttatgaacacacactggtaaaaattctcttaggaatgccttaagacagcaaaggaaaaatttttacctgttggcaatatttattttaaaaagccatataccaaagtataaaatcattactatggtgaatggcgttatataacttagaataaagattttacaattttttttcagtttcagtctttgctaactttagtagatgctaatcagtatactttagctgttaaaggtgattgtactttttcttcttttaaatcaagatttttctttgaagagaaaatcgaacattagaggcactattgacagcaaatggaaacagggattcaagagctaatatatctcttctcttacatttctattcttttgtattgccttatttaggaaattttttattttcttatttgagaactatgaaagaatcccagagtagaaatcagcttaagggaatagtgaaagaaatttaaataatcgattgctcaagggtataattattttgattgctcagaattttgctctatatgtttaatgtgttaaatgtaattaactgccagccaaataatgcttattgcatttaagatgtgaaaaatgtccttttctaatgcagtattttttattgtctcacaatgatctaagtgcctagtacataataggtactcaacgtgtttctagtcaatgatttaatgatctgacaagttaattttggacgaacattcagaaattgagtattttttagtgggcacataaattacttctctaccttattaggtagttaaatctttataaagctttaagagaaatttttgtgtgtatgtggagaaatctgtctttaattatcttttaattagaaaactcattatttcacttccttgcaaattctaaatttttaatgttaatcatgatacttaattcatcttaggtaatattattttccttattttaatttttcaaatgagtgcttaccctgatataaaagatttataaggttttaagacattttacttgttgtgcaaataacctggtttggttcaatactgaagcaggaccgaatctgaattttctcaaggttaatgctgtatatgtagttccttattttctgtgatgatgcaaacagccaaggatcttttcagttagaagggactttagtaaggctataataggtctttcttttcagacattttaaaccaaggattctaacatgtgcttctcttctccaaacttgccactaaatacttaaacaacaaagacattgaatcctggctgggcgtggtggctcatgcctgtaatcccagcactttgggaagccaagacgggcagatcacttgaggtgaggagttcaagaccagcctagccaacatggggaaaccctgtctctactaaaaatacaaaaaattagctgggggtggtggtgcacacctgtagtcccagttacttgggagggtgaggtgggagaattgcttgaacctaggaggcggagatggcagtgagctgagatcgtgccattgcactccagcctggttgacagagcaagacacttcatctcaaaaaaaaaaaaaaaagaaaaaagacgttgaatcctgcaacgtgacattatttatttttattatttgaaatagaagtgcaaaatcaatgttaatcaaatatgtaaaatgtattataaatataaataagtgaatttcagttctggtaaggatgctttaataccagggttctctggcaacataattactgaaatataaaaagatgtttagcatgttgtccatagactatcttatgatttaatactcctatgaatatctacatcaactggttctgtgttaaactttaaaacatgaaccttcagaatttcattttttctttgtttcaagtttttcctttacataattttatgattacacattaaagtggaatagatagggtgaactctctactgaaacttatcaactaaaaacctgtaagccaaaaaaaaaaaaatcagggaaaaaaatctctaaatacgttgaatttatttgggaattagaaaagaggattataacctgagatgcacagctgtggcaagctacatatacatcaaagaagggaggataaagggaaatgtttttctttttttctttttttttttgagacagagtctcactctgtcgccaggctagagtgcagtggcacaatctcagctcactgcaacctccgactccctggttcaagcattctcctgcgtcagcctccgaagtagctgggattacaggcgcacaccaccatgcccagctaatttttatatttttagtagagacggggtttcaccatgttggccaggatggtcttgatctcctgaccttgtctgcccgccttgggctcccgaagtgctgggattacaggtgtgagccactgtgcctggccaaagggaaacttttatttggcaaaaggagaagttcacataaactgcttggaaacagacattggttttggatactcaaagtcagagttggcaccattttagaggaagagatgctgttactgggcaggtattgttttgagagcattttatctgaattgctgcagtcctacagaatttcttattttagaaagtccttgagacaggacttccaaaaatgtcttttatctcgtccatgcaatcatgaaccctactcctttgtgctctcctggctctagtttgtgtttgacaaacagtgatttcatcctggtatctgcaactttcataaacctttatttatatattagtacttcaaagattaaaaaaaattgtaaatctcttgcctcaagaaaaagatttagtgccaaagaataagtcttatttttaaaatattgtgaatgagacttgtttcatttgatttttttaatggcttatgatgatataaaatgaaagctatggactttaaaacatatttatcctgtattctttcttagcactggtgtcttttattaatgctaacagtcgttttaaggttgcatctcttatcacactgtataatatttgaggtaatgataatttacatcttcttttctaatatttctgtcacctattttatcttgtgtttgctagaattgtgaaaagagtgttgaaaaattgagtgctgggctcttctgctttgttcctatttcaatttcgttggtatttcaccagttgacattatattgactttcgctttatgacttttagaaatgactgctaaaattatcaaatgccttttatggggatctaatgataaaaatcatatagtttctatctttgaatttatgagtgtagtgaatatatatatttttctacactgaaacattcccacatttctagaataaactctatttggttgtgaaatattaccattttaattacttgctggatttgattagtttatattttgtttatatggtttcagaattttttttaaataattgccacaagatctcactctgttgcctaggctggagggcagtggtatgatcttggcttactgcagcctcgacctcccaggctcaagccatcctcccacctcagcctaccaagtagctgagaccacaggagtacgccactacccctagctaatttttgtattttttgtagagatggggttttgctctattgcccaggctggtcttgaactcctgagcacaagcaatctgccagcctcggcctctcacagtgctaggattataggtgtgaggcactgtgtgctgcctttacaaactttgttttgtagatacagtgtctccctatgttgcccaggctggtcttcaactcctggcctcaagcgattctccctccttggtctcccacatgatgagattacaggcatgagccccccccaccatacctggccataatttcagtttttaagtaagattggtccatagttttatttatttgtgctatctttatccagttttgatattagtgttagtctaactttgtaaatgaatttagatttccacctttttttctatgctctgcaatagtttaaatgatgaaaaattatcatgctatttggtttttgaaagttagagtgtgctgcaaaaccacctgggcttgctgatacttttagaggtagatctttgattattcttttcttctatgattattgatttgtttgattgtctttctcttcttgaatcaattttagaatttatggtttttagaaaatcatgcatctcatctacattgccaatttattggcaagaagttgcacaaaatattttcttataattattttagtatcttccatgaccatggacgtttttcttttctcattaccactattaactctttaagcaaaacattgaaatcaactttttcttccccaacctgattatcacaaattctagtagcatatcttaacttcttaaagaaaataagaagtcaactatctaagactcataggtttgataaaatttgaaagatcctgcaatccttataatttcctactgtttgtccttatcctgttcatattttattagtaatagcaaccacttaatacgtttattgtgtgtcagacacttggtaaataaaccctttacttgcattatttaattcccagagtagctctatagcctagaaattagtgttcccattttatgaatgagtaaactaaagctcagagaggttatataatttggccaatgatattcaatcagcaagtggcagaatgatgtgggaaccgagtatgtcagattctggggtttgtgcatttaatcaccactctctactttcggtatctttttcattattccaaattataatacttacttttttctaaaaattagtatataaccaagtatcaaaggcctaaataaacccatataacagcttgaaatgcgctgtaaattatgaacctaaaaaaaccttgttattgtaatgattttttaaaggatatttgttttttagatatttctgtgaactttccttaccttatctctgtattttgagactagacatagagcctgatttctaatatttagtctaacagaaaagatgtcactttttttgtatttagagagaccagtaggtgtcaactagtaattcaatttttaaaaaagattatgataaaatagacataataaagtcactatcttaaccattttgaagtgtacaattaagtagtactaagcacattgttgtacaactattaccaacatccatctccagacctcttttcatcttacaaaattaactctgtacccattaaacaataactccctgttccctgctccccagcccctggcaaccaccattttctacttaccacatgtaagtggaatcatgtggtgtttgcctatttttgactggtttatttaacttggcataatgtcctcagggttcatccatgctgtggcaggtgaatggatttccttcctttttaaagccgaataatattccattgtatgtatataccacattgtgggtatccattcatctgtcaatggacatttggtttggttctaccttttggctattgtgaataatactgctataaacatgggtgtagaactatctctttgaggtcctgtttttttatttatttatttatttatttatttatttatttatttatttattttgagacggggtctcactctgttgccagactggagtgcagtggtgcaatctcggctcactgcaacctctgcttcctgggttcaagtgattctcctgcctcagcctcccaagtagctgggactacaggtgcatgccaccatgcctggctaactttttgtatttttagtagagaaggggtttcaccatgttagccaggatggtcttgatctcctgacctcgtgatccgcctacctcggcctcccaaagtgctgggattacaggcgtgagccaccgcgcccggcccgaggtcctgttttataaaaaaaattactttacttttttaaatagattcagggtcttgttatgttgcccaggctggtctttaactcctgggctaaaacgatactcccacctcagcctcccaaagtgctaggattacaggcatgaaccaccgtgcttggccaagatcttgattttatacccagaagtggaattgcctgatgatatattaattctctttaattttttgaggaacgatttgcacttaattttaactaaacaatgcaataaaacaatgttctattgccttgggtcccagatttagtacatccctgaaagtcagggacacctaagataagataatcttgggatttatgtttggcatgaggtcctgggcgacaggggagtgggggagggccaaagttctgggatctagaacctactaaagttttccaccctagcccaccctgcctacctggcttccatagtttagaggatgcccattggtactgtggtttgagcagaatgacagaaaagctacaggacaggtcctaaataaatatggattctttcagactttgtagtgaatctgcattgttattatttagagaagcattaaggcataatgattaagaacatggattctggagcttgacttcttgggtttaacgctcagctcagcctttttttactacttgggcagttacttaaattatctgtgccacaatttccttatatgtaaagtagttattataataatatctacctcataggattattgggaggattaaatgaattaatacatgtaagtgcttagaaaaatacttgacatatagctctcactcaatgttagtaataatgataatattattttttagaaacagggtcttgctatgttgcccaggctggagtgtagtggtgtgatcatggctcgctgcagcctctacttcctgggctgaagcagtcctcctgcctcagcctaccaaagtactgagattacaggcagtagccaccacgcctggccgaataatattattttaaattagcataggttatgatgtggctttccttttaaaatttattttattttatttttttaatttttaaatttatttatgtggctttccttaaaaaccaatacgaagagtaagattccattctgtgagttaaactttttggattgcttatactatgaataaaaaagatgtaacggcagtttaaagaaataggatttgctgtccgatcagcaggattagattatagcttgatgaattctaatctatttagtattatataaattggattgtagcttgatgaaacatagaaaacggatttctagtcacatagaaaatcgatgctatgacaggagctggtcatagaggtttgtgttgtctcttgttgcctagaccctcccaaacattgtccaggaatgagatgcctttgtgcataccccatccaccacttcattctaagcagatgtcagtcaccactactaaagcagaatctgatagcactaaacatttgagtcacataatggactcctctaatccataaggcaaccttatgataatttggcttgctatgtagcttatctacatggagaggctatgtaacctggatgacttgaatatatgcttgcatatccagttataagtcttactagaaatcagtacattagttttttgtctttacatgtcaatctcaagaggtttgttaatccaaacctgcttctgatgagtaaatccattctccctgtacttactaagtaggtagttgagcatataaagctaagacccccaaaccctggaccttggtagattcaccaagataatgtgtccgtctcttcagtctcattgttttcttgggatatatcccagtgccttttccagatcatcatattactagctaccttaatttacttctattttctttatttccattagttctatatgtgtggtggcagagatattcttccatatcaccattgccagttggctgaagaggggtggagcaacccaatttctctctctcaatccccggccagcctgatatgaccaagaatcactgcgtagtgagcaaggaaagctaatcactgcactgcaggatctcactttgtggaactattgctttgctatatgccttcttatagcagacggagctgaaaggaaccttaaagatgaactagcccacatttcttgttttacagatgaggaaacagattacttgccttggacagtatatctttatgctcttctaacagtcttttgtctaaggttggcctggacttacgacctgtgagtaatcttctttgtagccctagtcttatcgaaccagtacaaaagtttaactgccaaaggcactttctttcctatagttctgacaacttctccttttgttatataccactgatatccaggttcagttcatcatctatttcagaccatgtttctaattggattctctgtagcctggttcatgttgtagtctgccattttctggcaacaaattggatctattttaataatgatcagagatgctggatttgtcatgttgggatctttttaactcagtatcccaaattgtggacataggatttcatgaaataaaaataaacctcaacagtacttctttaaataatactcactatatacccagaataaaactatattccagtaattccattaaaatttgtatgctaacaataaaactttgttttaaaatttttattcatgtttattttaaccacaatactaattgctattcctaaaatatgtttttctttctcctcctcccttatggagtattaaatgttttaatgtcatggcaaactcttttattagcttaggattactttatatatatatataaagaaaaaaattaatagcaagttacgagaaaatgtacatttttcttgtaatgtatctttacatatttcaaagaggcaagtggcagcaaatgtgaaataagcataagcaaagtgctttcatttaagtgcttagaggattaatcaaggagcacttcctagaagtgtgttttgaagattttaagagaaggtacaaatattcactggtgacgaggatggagtcagaaagagggaagtaaaacacacattatgcattgggagctgcattagaaaggggaatggatgctaacaaaaagaaaaaacatctcttgcaggatggtgaagcaggctttcagctgggatggagaagggatgctgagttacaatcattggtgaagttattgagatgtcatttcagccttgctactcacattttgctgggtaatgtgctagatcctaagggaaaagctaaagagaagggagagacagtgcttgacctgtaggtacttatgatcttgctgatgagacaaggcaacaggaagttaaaggaggatccttgaaagccagtaagaggaacttggattttatacagtatgtgatgacaggagccattggaggttctcatgtatcatcttacctctatcatctgctcagaagggagaggtctgagctggggaagatcaaactgagcaggtggctaggttttaatctttatagctatatgtaatcagcagaagagctttttcccacacaaaactattttgaatcactttagaaaaaaatgagctgcctaaaatcttctgtccatgattaacaattaatagaaaatcactggtttgctcctgcaaacagcacttaatgtcagtagcttcaggctgtttttcaattttacagtaaattttttaccgaaacaaatttaggtagctattttgtccatgggcttttgtagtggaaagatgatgtgagtaaaatagaataatgagattccttttctgcatcaaaatattagcaagctgctaatggttccattttgatactgccactttcaaaataaaggagagagatcaagttgcttatggaaacattttggattatgtttaaaatagtgtaactttataatagttgatatggtaaataattcaaggtttgcttttagtgcatcagtttatctccatcttggctcagccctgagagagaaagtttccagatttttattgcctatctaataagtcccttggtaattggtttcatgctgtaggaatgtagattttatttcttccctttcttcttcttcttttcatctgcctccttgctacttgcaaactgttctgtgatttccactatctccactgaccttccagtgggaagccttccaaggtccttggtttcctggaatgacatttgaggcatatttaagtgccttacgatattcctgggtttatttgggttttggcccatatgcattggtggtaagtccctgagaggcactagcacaaaaacaacaggagccctgaggtctggaggtaggttgggttggagttgtccactcggcatttgaaaaaactgtccaggaaaggcattgtttaaggggtagctctctaaagcctcctgagcttttgtgtttggattcctttttgtctggagaagaacatcagtgaagtaaggttttacgcctgttatggcattgatttcatatgcgttgtgcctgtcagccagtgctctcccagttaaaatgggctgaaaaacatgtgatcctgagacaccacttataaagctgtggagaacagaatgccagatcccaccacttattggactcaaaacaacccgcggccataagctggccaggctccggagagcttcgcggttccatgctgaggcaggaaagtccatctcagtatgatagagctgagaaaaataaatactaagagtgatgcctggatacgtaatcaggaaattatacattttgctgatgcagcagtggttagcttcattacaaggggagttgttggaatacagaatgatatgcctgatgctgtcattattgtatatggctgagtcaagataaccattcatttcaaagagcattgattctggatggatataattcccagtgcaactgctagcatggcccttttgcaccaggctaccagaagaagtttttagttcataaaatgtgaggtgttttgtttgaggaaatgttgtcccataagggaatccaaaaatctgacaaaattctgtgagggaaactcttgcttcttcacctgttcgaatatggtaaggacaattagagcaatcgagagagaagcttagccagtaatatggttttactattgttccatgatttgctaggtactcctcatatatgggctccattgctagatttactgtcttctagctgcaaacctaaacaaggaagagaaattacatataaaaccagcgcaggaaaaactgaagacagtgcattaatttattaaaccatactttctttaaaggaagtagcacaataaagatagtgatatatgcatagatttaaaagctcaggattcattattctttattgagactcctagagcatggggaggaaacagaagagaaaggcgttcttcaactttacctgtttcatagattccaagtcagtaaagcaaatgagttaacaatgcaagttctagaaacagactgtctggttttaaatttgggcttggccaattatcagcttggtggcctttgacaagttatttaacatttgggagccacagattccttgtctgtaaaatgaagatattaatagtacttacctgataagattgtcttgagcattgaataacagaatgaatataaaatgcttcactaatgtgcttgtcacatagtaaggactcagtaaatattaactcttagtagtaaaagtacaaatcctagggttatctagattattcctaattataaaagtacaaaaaagtgttttgcattttgttcatgatctttcttctcagaatatgttaacatctaatgtattgtgcagaactattcagtgtgcttgcatttaacatcaactttcttaaaatcactggaaataatttggaggtttttgggttttttttgagactaggatcatgggatctcttttgcttaatgatagagacttcttaggaaagtgccacttgagtattctttggattgtggacactcattcattgacatgtaagagttttctttcccgtgagtgggtcttgttagaagacttttgaaaaattactgttacagaaagcaaatatggttctttagaatatttcaaattagtagtttctgggatgttaaactcaaaaagctgagatctttaagtaatgattttttcctttaaaaaatattccttcagttatcgttgttcctataatgctctaggagctacctattttgtttgtttttgagacagtcttgctctgttgctcagattgcagtgcagtgagatgatcatggctcactgtggccccaaccttccgggctcaagtgatcctcctgcctcagcctcccaaatagctgagaccacaggtatgtaccaccatgcccagataatttttttattttttaggagggatacagtctccctatgttgcccacactgatctcgaactcctgggctcaagtgatcctcctaccttggcctcccaaagtgctgggattacaggtgtgaaccaccatgtccagccttccgtcactattaacatgtctattccctccagtctttttgctatatgtgtatgttacatataatataaacaaagtcatgttttataccctgctttttcacttaatattgtgccatgagcattttcccatgttattaaaaataatattcggccaggcgtggtggctcacgcctataatcccagcactttgggaggccagggtgggcggatcatgaggtcaggagatggagacaatcctggctaacatggtgaaaccccgtctctactaaaaatgtaaaaaattagccaggtgtggtggcatgcgcctgtagtcccagttactcgggaggctgaggcaggagaatagcgtgaacccaggaggcagagcttgcagtgagccaacatcccaccactgcactccagcctgggtgacagagcgagactctgtctcaaaacgaaaaacaaaaaacacaatattcatggctaattagttttttattatgtaactgtaacattcagtttcttgcctcttttaattattataacactttgataaatatttctgtgagaaattatctattgcatatattatataatatttattataaagaatcagatttttttttttttttagaatagattactagaaatcatagtattaggtcaaacattgtcaaatcgcttcctaggaaggtgtaccaatcttatcacattctcttacaatgttgtttatcccaatttgagaagggagcattggtatttttttgttgctataatgtgtgcctttattatttctagtgaagttgaacactttttgacatgcttattggtctgtggtatttattcttctgtgaaatatatttgattttttacctattttttgcgtgaagttttccttattggtttgcaagacatttttatgcatcaagaatattaaatctgccacatttgctgctaatattttacctggtttatacagccttttaattatgccaatgttattttaattgcaccaaattttacatttttatgtggtccagtctctactcctgtgattttttttcttattgtatttagaaatgccttcctcatcaaagcataattaagtattccccatattttcttctagtatttatggtttcattttttacatttaactttgtcagataacaaaactgataaggcagaaaatttaaatgaggtaaactgaccattgcaacagaatatatttttcacttttcaaaatctcacttatcatatcacaagtatgaatacttgtgctaataaataaattatggcctctcatatggaagtgctatgttcaccttctgtcttcctcagcccacatcagctcattcattgctgtatttgatacagcttgatctctagcctgaaacctgcagagttcctatgctaatcctatcctgggcagaaaatatgttaaaagcctcaatccagctgtaggtggaatgtagctttattcatgtcaccattatcttagtggctaatatcctgcagtaactctggcaccacatacccaccagattctagatttctcctagcctctgctgtgtcatcttaatccataggattggacattagctttgttttttccttagtactatattttcctgatgtaactgaattcctgccttgaggcttcctagaccttgtcatagctttccttctagagagctggatttaacccttggcagtggacgatctcttggaacctgacgccatttcctgcttactcccgagcattgtttcctctctggacctcctccttgcttagccttcatcaggctggatggatctctccatcagaacttgccaaaaccaagcccaaactttcatgctttttaatattgtgcccttgatgtggtcgacttatgggtggtacaccggacatccaggttactgctcagattacaatttcaactcacccatagacaatttacagattgatttggctaaatgttatggaaacagaaccaaaaggcacttttctgtctttattactatttcttaaggtgatgtgtatgtggagttaactatatataatggtcccataattacccttttgggaaacaaaagtctttgtgtgtttttagataaaggtagcaaaatggaaactccctattgcttttctaagcacgccttcctttgcacccccatcttctgtggctgttttagccagaaatgatacatcattactgtctttaaggagatggagaggactgtggctttaacacatagtggagggagctctgtagtctcattcttgctgacaacttttcagtgtcaaccaactatagtttcctattggtgaagttttcactttttcagagtctttctgggcttgttctttgatcaccctcatctgaagaggaagcaggaaagaactgttgccctctttgaactcttagagaattcatggtttattgtatcaatttgttatcgaccacagattatcttgttaacttttggtatctgtcattttattctccccaaccaggtggaaatgtaccctgtttaggcccaggacctaccttagcaaccttgattggctcacaagccaggttgcttaagacttgtttccccagcagctggtgtccctacttcctgcctagcccttttccttttgctttgtctgtgcttgggaaatacatgttatactctgtagagcagatttgctggcagtaagaacagagatgtgtagagcccagcgtgctggagggctctctgcatctggctgtgagtggcccctggactgggaccgtgggaggacagctttccatagtttaacataaatgaaccacaccataaggacaatctgctctcatttcactcaactaggatttagtgagtactgttaaagcacagtttgcactggagtaattggagaatggagtttgcccttcacaatctgtgcacaatctgttagcagctaaaaacaaatgttagcagttataattaccatcaatttgtctccaggcttggatcacattccaggtgttagaagagatggtccatttccttttttttctcctttaagtcccatgccctgtttcaagtagcttcagaaggcaattgtgctgtaaagattcaccttgtaatgggttcaggactctttcacagtttgtgtctattcgttcatttgaactttgctgttccaagttagaaagcccttgctgaggtgtggctacctctaagaacactgttgattgggtgccatggtaacgtttgcaaagtagctactgctaggatacagctctgacacttattactttatttgcatatcaagccacctgttccaaagatgaaaatatacaggactgcatatcccagtctgggtaaaaggataatagctgactgttgaagagaacatgttgcagtttttctcctgctagctgaagaatcaagttctgagggcctgctcctcagcacctttctcctggtctagagtaggtgccaggcctggcggttctgttgcctgcgtgggtgccagggcttctccttgggaggcttgccctctgtgagagggagcagagagttgacttcctccaagaggcccatagtccctgaagggggtgtttttgattctgtctaaacctaggctatgtgttagcggtttccctcctcttagaaattgcctggaagactcttgctattggtatgtatgtggttccctccagtttaagacaagatttgttccaggatcggttgtagccccttctctgtggctaacggaagagccacttgtccttctccattcttttccttagtctcccttgacccccacatcatctcctagacacaaggcacattgatagtcacaattcactgtcaatcactctggattattccctcattcccctttcccaggccacctgaaggagtgagtggggattgctattgtgtacattccagtaataactattggctgtaagcagacatactctaaaaataactcagggatactgagcacccagagggcaccttctgtcttctcgaagcttcgccacgcctgtttccactgtcagacttccagtctgcaccacagcacacatcctttctcatccagagtgctcctactagacgagatgtttttgtctcctaagggcctcaggtgtattcatgaactcctcagctggttattttcagtttcatcttccttggtgcttgctctggcacatggtcactgctgcatcctgtcccttccccacagtttgccatgggtcatcccttttttctcattgcttgcatcttctaactgaatgaacttgtaaatatggaactgaaagtcaatcctcatagctcatcttttatttaatcctaataaatgacaatctattgcaaacattactttaaaaatattacttatcaaaagctgggtgaaaggataatagctgactgttgaagagaacatgttggggtttttctcccgctagctgaagaatcaagttctgagggcctgctcagttctgtaagaaagtattagctgtctgacaggttccagtgaggggaggaaaagacaaaaaatatagtccccaaatctgcaccagcatcccatgtgcactgtgcaccttccatggtggattagatgctcagcaaatgatatacctatggaaggttaagcctaaagaaacaggaaaaatgagcctttgtccactagcacatttatcaattgcattttagggtgattttagggataggcaaccccaattagtcattattctttaaaggtagttgtctgttagatgtaggaagactccaaggaatgttaagttggcaacattccatttaggttgcacagaatgacttttaagactaaacttcatcaggaggaaatgaaaggcctttaccatggttcctgttcacagtgaaattgacatgtattggaaaggagatgcttggaagaaatgtctagcttccccaacagactcctttcttctcttttctgtcttcctttgttaatctgccatgtttcatcttcattcagatgagttatgatgtatattatttatgtagagatattatgagattataatgaagaagatttacaaagactaaactctcctgcaatgatctaaatttttaagagacatttactcagtttggcactccaaaaattattaatctatgttctgacaacccagtttggggtatatccaagatggcttgtgtgttgctagttactgcttataaggcaactttctctttgggtggcaggaagtaaaatatttataagttattgctaaaatgttaaagttttatttgaacctactgtacccaagtaattatataattcatcactttagtagcagtttggttgacactgaacaacaatgctcaaattcatgtagcagtaacaaactacgtgataaaaggaactgaatttagaaagcaagcttcaagtaaagatcagaagattaagtagatttcatggagctcactaaggagttagatgggaaagatgagataagaaaagcactggagttgagaccaaaaggagacgaaaaagcagagggtggatcttcgagctcggggggttataaacaagatggccacaaggtggcagcacagtcttaacagcagagagctttctgtagggccacccttaatttgctaacaccacagactttctcttagaattcctccatgttgattttcctcattatcctaggggaaacagcagcaaatgtttagaattaaaaatgactcctaaaacttaagctgaggaaaagtatagggtaaaggcagcatctttacttccagagactgtttagatgctctaaagaaggcttccaactctctgtgggaaaggaccaattgacatttccaaaccatatgttaaacagtgatgggaggccattgttttgggctaagcttgtacactaggccccagccgaccagaccaaaccaaaatggagtcactcatgctaaatgtgacataaactaaaattttaaggaaacagatagatcccaaagcagaccaagttttttttcttttcttttcttttttttttctcatgaaaacaggagattccggcacaaggaagtccccttggctctctaactcttacaaaaaagtaacctgaaatccatgttcccaccttaaaaaccaactgttctgctctttccccgtgggatctgagaccaaataagtacatttatgatggtaacagagtgacctcaatgcctaaagttttggtcagtgtcaaaattgagaggttgaccaaaaggtggggaattgttaaattaagtttagcctaaagctgcctccttacatattttaagttcagcctaaaggtttcttcgtactcagcgaattgtaacctaactggaatgtaaatagactgtaacctactcttgtaccaatcaccaagttttggccaaaggcagccaactgttcaaactgtgttcaaatcagggaaatgccaagctgtaacaaatccagctgtttctgtacctcacttccattttccttatgttgctttccttttttgtccacaaatcctctgtgaccatgcagcagcactggagatgctttgaacctattctggtttggggagctgcccaatttgccagtcgttccttgctcagttaaactctgttaaatttaatttgtctaatgttttaacacatcatacactaatacttttgtaaaagttaataaaaatgatattatacaaagaagaacaaaaaagacatacagaacataaacctattttttggtaattagttaaactaattgtgaaaatagcacatcaaactttctttttaaggtttttgaaaaccagaaaatctaattattatgctctagccaaactacccaatgtttgctttacattctttccccacaaaatgaaattagtgaacttaggcagactcaactaagttcacaaaatcgactcaaaaaaaaaaaaaaaaagattgctttgcttattggggtcttttgtagttccatatgaattttagaattttttttatttctgtgaaaaatgtccttggaattttgataagggattctgttaaatctgtatagcactttaggtcatatggacattttaacaatattaattcttccagtccatgaatatgagacatcttgagacatctttccatttctttgtcttgttcagtttttctaatcaatgttttacagttttcagtgtataaatctttcttttttaaaaaattttattattatactttaagttttagggtacatgtgcacaacgtgcaggtttgttacatatgtatacatgtgccatgttggtgtgctgcacccattaacttgtcatttagcattaggtatatctcctaatgctatccctccccgctccctccaccccacaacagtccccagtgtgtgatgttccccttcctgtgtccatgtgttctcattgttcaattcccacctatgagtgagaacatgcagtgtttggttttttgtccttgcgatagtttgctgagaatgatggtttccagtttcatccatgtccctacaaaggacatgaactcatcattttttatggctgcatagtattccatggtgtatatgtgccacattttcttaatccagtctatcgttgttggacatttgggttggttccaagtctttgctattgtgaatagtgccgcaataaacatacgtgtgcatgtgtctttatagcagcatgatttatagtcctttgggtatatacccagtaatgggatggctgggtcaaatggtatttctagttctagatccctgaggaatcgccacactgacttccacaatcgttgaactagttcacagtcccaccaacagtgtaaaagtgtttcaatttctccacatcctctccagcacctgttgtttcctgactttttaatgattgccattctaactggtgtgagattagatctttcaactcattgcttacatttattcctaagtattttattctttttataaacgggaatttttcgggggtggagccgagatggccgaataggaacagctccagtctacagctcccagcgtgagcgacgcagaagatggctgatttctgcatttccatctgaggtactgggttcatctcactagggagtgccagacagtgggcgcaggacagtgggtgcagtgcaccatgcgccagccgaagcagggcgaggcattgcctcactcgggaagcgcaaggggtcagggagttccctttcctagtcaaagaaagggctgacagagggcacctggaaaatcaggtcactcccaccccaatacagcacttttccaacaggcttaaaaaacggcgcaccaggagattatgtcccgcacctggctcggagggtcctacgcccacggagtctcgctgattgctagcacagcagtctgagatcaaaccgcaaggtggcagcgaggctgggggaggggtgcccgccattgcccaggcttgcttaggtaaacaaagcagcctggaagctggaactgggtggagcccaccacagctcaaggaggcctgcctgcctctgtaggctccacctctgggggcagggcacagacaaacaaaaagacagcagtaacctctgcagacttaagtgtccctgtctgacagctttgaagagagcagtggttctcccagcacacagctggagatctgagaacgggcagactgcctcctcaagtgggtccctgacccctgacccccgagtagcctaactgggaggcaccccccagtaggggcagactgacacctcacagggccgggtactcctctgagacaaaacttccagaggaacaatcagcagcattcacggttcacgaaaatctgctgttctgcagccaccgctgctggtacccaggcaaacagggtctggagtggatctctagcaaactccaacagacctgcagctgagggtcctgtctgttagaaggaaaactaacaaacagaaaggacatccacaccaaaaacccatctgtacatcaccatcatcaaagaccaaaagtagataaaaccacaaagatggggaaaaaacagagcagaaaaactggaaactctaaaaagcagagcgcctctcctcctccaaaggaatacagctcctcaccggcaatggaacaaagctggacggagaatgactttgacgaattgagagaagaaggcttcagacgatcaaactactccgagctacaggaggaaattcaaaccaaaggcaaagaagttgaaaactttgaaaaaaatttagactaatgtataactagaataaccaatacagagaagtgcttaaaggagctgatggagctgaaagccaaggctcgagaactatgggaagaatgcagaagcctcaggagccgatgtgatcaactgaaagaaagggtatcagtgatggaagatgagatgaatgaaatgaagcgagaagggaagtttagagaaaaaagaataaaaagaaacgaacaaagcctccaagaaatatgggactatgtgaaaagaccaaatctacgtctgattggtgtacctgaaagtgacggggagaatggaaccaagttggaaaacactctgcagggtattatccaggagaacttccccaatctagcaaggcaggccaacattcagattcaggaaatacagagaacaccacaaagatactcctcgagaagagcaactccaagacacataattgtcagattcaccaaagttgaaatgaaggaaaaaatgttaagggcagccagagagaaaggtcgggttacccacaaagggaagcccatcagactaacagtggatctctcggcagaaactctagaagccggaagagagtgggggccaatattcaacattcttaaagaaaagaattttcaacccagaacttcatatccagccaaactaagcttcataagtgaaggagaaataaaatactttacagacaagcaaatgctgagagattttgtcaccaccaggcctgccctaaaagagctcctgaaggaagcactaaacatggaaaggaacacccggtactagccactgcaaaatcatgccaaattgtaaagaccatcgaggctaggaagaaactgcatcaactaacaagcaaaataaccagctaacatcataatgacaggatcaaattcacccataacaatattaattttaaatgtaaatggactaaatgctccaattaaaagacacagactggcaaattggataaagagtcaagacccatcagtgtgctgtattcaggaaacccatctcacgtgcagagacacacagaggctcaaaataaagggatggagaaagatctaccaagcaaatgcaaaacacaaaaaggcagaggttgcaatcctagtctctgataaaacagactttaaaccaacaaagatcaaaagagacaaagaaggccattacataatggtaaagggatcaatgcaacaagaagagctaactatcctaaatatatatacacccaatacaggaccacccagattcataaagcaagtcctgagagacctacaaagagacttagactcccacacaataataatgggagactttaacaccccactgtcagcattagacagatcaacgagacagaaagttaacaaggatacccaggaattgaactcagctctgcaccaagcagacctaatagacatctacagaactctccaccccaaatcaacagaatatacatttttttcagcaccacaccacacctattccaaaattgaccacatagttggaagtaagctctcctcagcaaatgtaaaagatcagaaattataacaaactgtctctcagaccacagtgcaatcaaactagaactcaggaataagaaactcactcaaaaccgctcaactacatggaaaccgaacaacctgctcttgaatgactactgggtacgtaacgaaatgaaggcagagataaagatgttctttgaaaccaacgagaacaaagacagaacataccagaatctctgggacacattcaaagcagtgtgtagagggaaatttatagcactaaatgcccacaagagaaagcaggaaagatccaaaattgacaccctaacatcacaattaaaagaactagaaaagcaagagcaaagacattcaaaagctagcagaaggcaagaaataactaaaatcagagcagagctgaaggaaatagagacacaaaaaacccttcaaaaaattaatgaatccaggagctggttttttgaaaggatcaacaaaattgatagaccgctagcaagactagtaaagaagaaaagagagaagaatcaaatagacgcaataaaaaatgataaaggggatatcaccaccaatcccacagaaatgcaaactaccatcagagaatactacaaacacctctatgcaaataaactagaaaatctagaagaagtggataaattcctcaacacatacaccttcccaagactaaaccaggaagaagttgactctctgaatagaccaataacaggctctgaaattgtggcaataatcaatagcttaccaacgaaaaagagtccaggaccagatggattcacagccgaattctaccagaggtacaaggaggaactggtaccattccttctgaaagtattccaatcaatagaaaagagggaatcctccctaactcattttatgaggccagcatcatcctgatatcaaagccgggcagaagagacacaaccaaaaaagagaattttagaccaatatccttgatgaacattgatgcaaaaatcctcaataaaatactggcaaaccgaatccagcagcacatcaaaaagcttatccaccatgatcaagtgggcttcatccctgggatgcaaggctggttcaatatacacaaatcaataaatgtaatccagcatataaacagaaccaaagacaaaaaccacatgattatctcaatagatgcagaaaaggcctttgacaaaattcaacaacctttcatgctaaaaactctcaataaattaggtattgatgggacatatttcaagataataagagctatctatgacaaacccacagccaatatcatacttaatgggcaaaaactcgaagcattccctttgaaaactggcacaagacagggatgccctctctcaccactcctattcaagatagtgttggaagttctggccagggcaattaggcaggagaaggaaataaagggtattcaattaggaaaagatgaagtcaaattgtccctgtttgcagatgacatgattgtatatctagaaaaccccattgtctcagcccaaaatctccttaagctgataagcaacttcagcaaagtctcaggatacaaaatcaatgtgcaaaaatcacaagcattcttatacaccaataacagacaaacagagagccaaatcttgagtgaactcccattcacaattgcttcaaagagaataaaatacctaggaatccaacttacaagggatgtgaaggacctcttcaaggagaactacaaaccactgctcactgaaataaaagaggatacaaacaaatggaagaacattccatgctcatgggtaggaagaatcaatatcataaaaatggccatactgcccaaggtaatttatagattcaatgccatccccatcaagctaccaatgaccttcttcacagaattggaaaaaactactttaaagttcatatggaaccaaaaaagagcccgcattgccaagtcaatcctaagccaaaagaacaaagctggaggcatcacgctacctgagttcaaactatactacaaggctacagtaaccaaaacagcatggtactggtaccaaaacagagacatagatcaatggaacagaacagagccctcacaaataacgccgcatatctacaactatctgatctttgacaaatctgagaaaaataagcaatggggaaaggattccctatttaataaatggtgctgggaaaactggctagccatatgtagaaagctgaaactggatcccttccttacaccttatacaaaaattaattcaagatggattaaagacttaaacgttagacctaaaaccataaaaaccctagaagaaaacctaggcattaccattcaggacataggcatgggcaaggacttcatgtctaaaacaccaaaagcaatggcaacaaaagccaaaattgacaaatgggatctaattaaactaaagagtttttgcacagcaaaagaaactaccatcagagtgaacaggcaacctacaaaatgggagaaaattttcgcaacctactcatctgacaaagggctaatatccagaatctacaatgaactcaaacaaatttacaagaaaaaaacaaacaaccccatcaaaaagtggacgaaggatatgagcatacacttcttaaaagaagacatttatgcagccaaaaaacacatgaaaaaatgctcaccatcactggccatcagagaaatgcaaatcaaaatcacaatgagataccatctcacaccagttagaatggcaatcattaaaaagtcaggaaacaacaggtgctggagaggatgtggagaaattggaacacttttacactgttggtgggactgtaaactagttcaacccttgtggaagtcagtgtggcgattcctcagggatctagaactagaaataccatttgacccagccatcccattactgggtatatacccaaaggactataaatcatgctgctataaagacacgtgcacacgtatgtttattgcagcactattcacaatagcaaagacttggagccaacccaaatgtccaacaacgatagactggattaagaaaatgtggcacatatacaccatggaatactatgcagccataaaaaatgatgagttcatgtcctttgtagggacatggatgaaattggaaatcatcattctcagtaaaccattgcaagaacaaaaaaccaagcaccgcatgttctcactcataggtgggaattgaacaatgagaacacatggacacaggaaggggaacatcacactctgaggactgttgtggggtggggggaggggggagggatagctttaggagatatacctaatgctaaatgacaagttaatcggtgcagcacaccagcatgacacatgtatacatatgtaactaacctgcccattgtgcacatgtaccctaaaacttaaagtataataataataaaataaaataaaaataaatgggaatttttcttgatttccttttcagatagattatgattggtgtaaagagatgcaactgtgttttgtgtgttgatttttgtatcctgcaacttaattcattttgtgttctttacggttttcttcatataggatcatgtcatttactgagtacgtgctctgtggcaacaattttacatgcatcatatctgtactagtttagaattattataatttttatttgacaaataaaggaacttgggctcagagttgtttgctcaagattatacagctagtaactggcagagctgagatttaaacccagagcactctaactctaactccagagggcatactttttttttttttaatgccataatcctgctatcgcatcctactttttgagcaaaataaaataatttcaaatttatgaactagtcttaagataaatgggaaaattgtatttcaaaagtgagacagtgataaagctaaggacaagaaaaaaatgttaactttgtatcctgtaaccttgctgtaattgcttattatagttccaggagtttttcggtcaattctttttggattgtctacatagatgatcatgtcatctgcaaacaaagacagttttatttcctcctttccaacctgtatacttttttttcccaatcttattgtgttagctaggatttccagtacaatgttgaaaagcagtggtaggaggggacatccttgccttgttcctgatcttagtgggaaagctttattgttttttaccattaagtatgatgttagttgtagattttttaaaaatcaaggtgagaaatttcctgtctattcctagtttgcagagagtttttgtatttaaaatcattaatgggtgttagattttgtcaaatgccttttccacattcattgatatgtggaaaaatcatatgatttttcttctttagcctgttaatgtgatggattacattaactgattttcaaatgttgaatcagctttacatagctgggacaaatcccacttggttgtgatgtgtaattctttttatatattcttgaattcaatttgctaatactttcgttgagaattttcacatctatgttcatgagagatattggtctgtagttttcttgtaatgtctttgtctggttttggtattagagtaatgctggtctcataaaatgagttagtaagtctttcacttgcttctatcttctgaaagacattatagataattgtgtaatattttccttaaatttttggtagaattcagtgaacctatctgtgcctggtgctatatgttttggaatgttgttaattgttgattgaatttctttgatagatataggcccattaagactgcctatttatcttatgtaagctttggaagattgtgtctttcaaggagttcgtccattttatctaggttgtcaaataggtgagcatagattgttcatcatgctccttgattatccttttaatgtctgtgagatccgtagtgatgatgtcccctctttcatttctgatattagtaattcgtgtccttctgttttttcttagttaacctggcttgaggcttattgattttattgatctaaagaaaacctatcagctttcggtttaatgattttctccattgtttttctatttttaattttattgatttctgcactggtttttattatttcatttttttctgcttactttgaatttaatttgctgtgctttttctagtttcctagagtgaaagcctagatgattgactgaaggtcttctttttttctttttttttttttttttgagatggagtttcgctctttttgcccaggctggagtgcaatggcgtgatctcggctcactgcaacctctgcctcctgggttcaagtgattctcctgcctcagcctccagagtagctgggattacaggcatgcaccaccacactcggctaattttgtatttttagtagagacagggtttctccatgttggtcaggctggtctcgaactcccgacctccggtgatccacccgcctcggcctccgaaagtgctgggattacaggcgtgagccaccgcgcctgggcctaggtctttctttttttctaatgtatgcattttatatatatttccatctaattattgcttttgctgcatcccccaaattttgaaacattgtattttcattgagttcaaaatagttttaaatttctcttgcaagttattctttgacctatgtattatttagaacttcgttgtttaatttccaagtattttggaattttccagctatctttcttttttcttttttaaaaaattgagatgaggtttcaccatgtttcccaggctggtctcggactcctgaacgcaggccatccacctgatttcagccttacaaagtgctgggattacaggtgtgagccaccacgcctggcaggaattttccagctatctttctgtttctgatttctagttgtaactccactgtggtctgaaagcagacactgtatgatttctattcatttacatctgtgaaggtatgttttagggtccagaatatggccaatttggtaagtgtttcctgttagcttgagaagaatgtatggtgttgaatgaagtaatttataaatgtcaattatatccagttgattgatggtgctattgagttcagctatttccttactgattttctgcaggctgtatctgcccattctgattgaggagtgttaatgttttcaattttaatactggattaatcttttgccttgaagttctatctgtttttgcttcacatattttgatactctgttgttaggcacacacacattaagcattggtatgttttcttggagtattgatcccttaaccatttggtaatgcttctctttattcttgacaactgtctttgctctgaaattaatgtagctactcttctttctttcgattattattagcatggtatatctttctttatctctttcaatctgtatgtgcctttatatttaaagtgggtttcttttaaacaacatatagccaggttttgtttttttagatcattctggcaatctgtcttttcattgatgtatttagatcattgatttattttttatttatttatttttttgagacggagttttgctcttgttgcctaggctggagtgcaatggcgcgatctcggctcaccgcaacctctgcctcctaggttcaagcgattctctagcctcagcctcctgagtagctgggattacaggcatgtgccaccatgcctggctaattttttgtatttttagtagagacggggtttcttcatggtggtcaggcgtgtctctaactcccaacctcaggtgatctgccctccttggcctcccaaagtgctgggattacaggtgtgagccattgcgcccagccagatcattgatgtttaaagaaattattggtatttggattaatatctaccttatttaatactgttttttatttgttgctcttattctttgtttctatttttgccttccacactttttcaaccttttatattttttattgagcaatctgtatgattgtatttttctgtcctttcttagcacatcagttctacttctttttaaacatttttcagtgattgtcttagagtttgtaatattcatttataactaatctaagtacactttcaaataacactatacggcttcaggtagtacaagtactatataataacaaaatatttctactctctcatcttttgtatcattgctgtgatttattttacttacatgcttatatatatgtgtgtgtgtgtgtctgtgtgtaattaaatgcattgttgctaatatccttttaaacagtcatctgttagatcaattacgaataaaaaaataaaagtttttattttaccctttacgtattcattctcaaatgctcttcctttctttatataaatccaagtttctgagctatatcattttcattctctttgaagaacttttaaaaatattacttgcaggtcaggcttactgacaacaaattctctcaatttttgcctgtctgaggaagtatttctctttcacttctgaacgttaatttcacagggtgtggaattctaggttgatgagtttttttctatcaacactttaaattttttcttccactctcttcttgcttgcattgtttttgagaaatcatgtgtaatttttatctttacttctgtgttcataaggtgtttaatgatttatttttaatttaatttaatttaattttttaagagatagtgtctccctatattgcccaggcttgtctggaactcctggcctcaagcaattctaccacctcagcctcccaaagtgttcagattacaggcatgagccatgagccaccacacctggctgcgattttttctttatgtttaattttttgaaatttgaatatctatgcctaagcatagttttttttgttttctttttgttttgcatttatcttgcttggtgttctctgagcttcctagatctgtggattggtgtctaacattaatttgggggaaattttcactcattattgcttcaaatattgcttctgctcttttctctttttcctctcctgggatttccattacatatgtttacaccctttgtagttgtcccccagcttttggatattctgttatgagtttttattttcagtctgttttctttttgcttttggtattggactttcttttttttttttttttttttgagatggagtctcactctgtcgccaggctggagtgcagtggcagtggtgcaatcttggctcactgcaacctccgcctcccgggttcaagtgattctcctgcctcagtctcccaagtagctgggattacaggcatgtgccaccatgcccggctaattttttgtatttttagtagagatggggtttcaccatgttggccaggatggtctcaatctcatgacctcgtgatccacctgccttggcctcccaaagtgctgggattacatggacatttttattgttatgtccccaagcttggagattctttcttcatcatgtccagtctactaatgggttcatcaaaggcattctttgtttctcttacactatatttttttgtaatctctgtgatttcttttttgcttttagaattttcatgtttctgtttacattatatacctgttcttgcatgctatctactttttccattaaagtccttagcatagtccatagtccatagaagcattaaatttctggtctggtaattctagcgtttctaccatatgcgattctgtccagatatgcttgttcagtctcttcagatctttaaactgtgttttttgtcttttagtttgccttataatttttggttaaaaggtacacatgatgtactgggtaaaaagaactgcagtaaataggcctttagtaatgtagtggtaaggtgtaggaagaaggggaagtgtattagttcattttcatactgctatgaagaaatacctgagactgcgtaatttataaataaaaagaggtttaatgcactcacaattccacatggctggggaggcctcacaatcatggcagaaggtgaaggagaaacaaaggcacatcttacatggcagcaggcaagagagaagtggcgagaaaaagggggaaaaaccccttataaaatcatcagatctcatgagaactcactcactgtcatgagaacagcagcatgggggtaaccacccctatgattcaagtacctctcaccgggtccctcttatgacgtagggattatgggagctacaattcaaggtgagatttgggtggggacacagccaaaccatatcagggagcattctgtggtcttatgagtaggtctcagtcttttggtgagcttatgcccctgaattgtgaacttcatcactgtttctctgtccctatctctctccatctccccactcccactcccacactttacatgggaaggaatgacttagaaggggttggaattgggtatttcttttcttccatgtggaaagctagagggagctgggttggctatttccctttccccagcttgatcaggctctgatcaaaccccagtaggctctggtaaaatagtttcttctgaggccaggctttcttaagaacagaatgctctggcacatttcaaaattggttttattttgtgtccccctgctggaatcataagggaatttttctctgatatttgctgtcaggtagagctcctggatgtaaaacgcataaaagtgtggaagcccccatatgactgggtctctctggagttttaaacttacagttgtcttcactgagcctctagcaatccattaattacagttcaggttttcctatcctagcacttgttcctgtggaggtttttgcctgggagtttatgttctgataagttgtgattctcagtatctgcctgtctctctgatatttggggcagtggtttgtcctataactctacttttctgatggttctaagaagagttgttgatttttcagtctgttccagtttttacgtgatgttaggatggagtagcaacttccaagctccttacatgctgaaccagtttattcctttttaatgctgaataatattccatcgtatggatatactacaatttgtttattcatctgttggtggacatttgaattgtttctagtgttgggctatcgtattagtccattttcatacttctgtaagaactgcccaagactggtaatttataaaggaaagaggtttaattgactctcagttctgcatggctggggagacttcaggaaatttatgattatggcagaagaggaaggggaagcaaggtaccttcttcacaaggtggctggaaggagaagtgctgagtgaaggaggaagagccccttataaaaccatcagatcttgtgagaattcacccactatcatgagaacagcatgggcaaaactgcccccatgattcagttacctccacctggtctctcccttgacatgtagaaattatggggattacaattcaagatgagatttgggtggagacacaaagcctaaccatattatgaaaaaagccactctgaacattcatgtttaagtctttgtgtgaacatatgttccacttttcttgcatgtatacccaatagtggaattgctaagttttatgataaataaatttcaactttctaagaactgccaaactgttttccacagtgatttaccattgtacattcccactagcaatttatgagcattccagttgctccacatccttgccaacacttggtattgtcagtgaaaggaagcatttactatatcaatttagaaagactagtttcttctaagcttgccatttgacagaaagggaatgaagagtggatgggactctgtagtttcttcatttggatagctaatgccccataaatctccaaagataccacatttatcaagaaatttgatatttaaattatcaccattttcagcttctcttgtcccaatttcttccaaatggagctaaactcagttcaatctggttttccaattaggtagagtatatggaagctgagaggaagtattatggctgtagactcagtagggcatatggtgagctctgaaaatcctccaagtggttgctgttgagaaattcattgtcggtctagttgtttcattatagataatttttctttgtgacatttaagaaacattccttacctttgattttttttttcttttttttttttgagacagagccttgctctgtcacccaggctggagtgcagtggcgcgatcttggctcactgcaacctctgcctcccaggttcaagcgattctcctacctcagcctcctgagtagctgggattacaggcacccaccaccatgcctggctaatttttgtatttttagtagagatggggtttcgccatgttggccaggctggtttcaaactcctgaccttaggtgatctacctgcctcggcctcccaaagtgctgggattacaagcatgagccacggcgcccagcccttacctttgatattttaatttcactatgatgtgtttaggtatggatttatcctgcttaaaacccaaatttcatgattcttatttttcattaattcagaaaaatagtcattattttctgagtcttattttctcaacagagaaatgtttctctgttctcaacagataaaaatatttctctcttttcccatcttttggaacatagatttggtatatgttgaacattttcatttattctatgtgattcttcatttctcttttgcagtggctataaaaattatcattcatttttcaatgctgcattctagttaatttctccggatcagtcatctagttctccacttctttctacaggtctttaatctgctatttaacctacttaaggggttttaaaaatccagtgcttatgtttatcatttctacatgctttagggattttggtctttaattaatttaaatgttcttatagactataacaaacaattctattttctaaagttcttgggagtctaactctgctttttgttatttctacctactcttgcttacctggattgctttttgagtgtggtaaaattttatttagtaagtcatacttggtggggatcctgtgtggcttacattcatgggatgtctttctagagcaatgtttccattttcttcttcaacttttattttaaattctggggtacgtatgcaggatgtgcatgtttgttacataggtaaacatgtgccatggtagtttgctgcacagatcatcccatcacctaggtattaagcccagcatccattagctattcttcctggtgtagagcagtgttttttaattttcctgcatattagattaatctactgagcctttaaatatcaagatgccaggttgaagctcagaccagttaactcagatactgtgagtatgagactgaagcatcagtgtttttaaaacctcacagtcaagattgagaaccattgctctagagaaaatttgcctttgatttttacaggcactgtgagtgtgttttcagacctggaccagtttaatatcagtgtctcaactttgggttcctgaactatataggtagcataaatttgaaactcatgtttggggaacctttttctttctctcatcaaacatgtaggctgagatagacagattccttgtcatctctttgcacttagagagtagccctttaggggtcatgggggcaaggaagggctctgttctacttcatcaggttgagcaaacccaaggcttcattgttgattccgtatgtctgtgaaatcctgaacttcttgattaccaatattaacaaatgccctctgtgtgacttaaatgtcgatgccagtgcagcagttctatgtttatgtctttttctgattttggttctaaattcctcttacttccgtgagagctcagctgtacatttagaatctttgttatatttaacaattctcagtttttctgtgtacttacatcacactattgctagaaatagaagtcttgctatgatggcattctctacctttgtggccatgccctaccctttgggatcatcctcttttccagatgcctgcctaaaccaagtgtgaacttgctgtgtctttagacatggtgcattgggtttgcaagtgtctatctggcaggcccctggagcttgtatgtgttccttcaccctgcttggcttggtcttggctttgtcttaatccatctggtctctgttgccaaggtctaggcatgctttgaattccaacctacctgaattatgtcaacctctattctttttcttgtgtttccaagtctttgtcttcactcacttgctaaactcaggtctggtttcagtttatttcctggactcatctttccacaaaggactcgctttccctgatttgagggtttgtagcacagtttataacaccatgggagtgagtccagctcaggattcacatttctaggatgccaagatggtctgagcaaatagcttctaactttatatgtcattaaaaaaacacttgttactgagtatgtaaattccaaatactttctattatatattgataacatttgtacctatagtattaattgaagataaatgctgtatcactgattttgtcaggaagaaggataccctttacagttgaggatacacttttgttttttttaaatttgcttaattcatgtatagccatcttcctgtgtatcaaataaaaccagctgtgactggattgtggctcttgtagtccatgcaacctttttactctgagaccttggaaggaagctgagtttggtggaaagcatccagagaactcttggcagccttgatggatcatttaccccagtttggacttttctatctcttttaggaagctctgctgagatcattactgaaacatcagttttcctcagagaataacccctggtcttctgccagtggagttagcatttggttatgaagatggctttgagaattaaataagatacctggaggcaagagtgcattatgtaccggtagtgagcccacagaaatgataggttgcatgattgttggtggatagtggtctaatataatctttaatctttcatctatcaattgcatcctttaggatttgtgttaatgcccccctttcaatcattctgtctttatttagatttctcttcatattttctgtcttttctttcttggcagtatcttcaaaagtaattaggcggctgtcccagaagttgcctttgaagattgttgcaatgtgtatacctgtcaaaaggaattgaccaaaccctgctgaaagctattttacacatcaatttatgagccaatctcagctcttctgttctgagctgatcatccagaatgatccaaaaggaaaccatcagagccaatcatagtgcctggagtgattttcagatgcctttttttcttcttttacttacacagggcactcgggaatcttgcactctggatgaacccagtttacattttggttgggatggggaaagtagagctttagactttattttgaaggcaaaaacccttttatttacataggaaacatttcaattctatatggtttttttttttctctttgttttcttttcttctttccctctatccttccttccttccttccttccatcctcccaccctccctcccttctttccttcctacctaccaacctacatttttttttctctcttttggtatcttggaacatatctaaggcttttggaaaatggacattgttgaagaaaaagtgttatcactattacaaaaatatgatttagaataatggaacctcagatttggaaagaacccaaggattcctttatttcagccatttaactaatgcttaaattctttccaatctagtcacagcccatgatgggatacctacatcacctgcaagtgttgggaaacttctgtgtcctgcagtatcccttacaattttgaacagctctggctgttatttagttactgtttatgttgagctaaaatatactctcctgtaatgcctatcctctgctctttagtttcttttttggggaccataaagagcagtatttttaaaatttcaggctgaaattcagggttgtgaaataattttaattggttatgaccatcattaaaagagaagaaaaaggccagatgtggtggctcatgcctgtgatcccagtgctttgagaggctgaggcaggagggtcacttgagcccaggagtttgagaccagcctcggcaacgtaatgagcacaggtctctacagaataatttaaaaattagcttggcatggtgatgtgtatctgttgtcccaactactcaggaggctgaggtgggaggatggcttgagcccagaaggtcaaggttgcaataagctgtgattgcactgctgcactctggcctgggtgacagagactctgtctctaaaaacaaataataataaataaataaaaggagaagaagaacaaatagaacagaatgagagtagaacaaaatagaaaatatcagagtatatcacaagtagtaaagttttcatgaaacctttgtcttgattttatgtttatttaattatataattaactatgtatgtgcactgtatctcaatggtcaaaagagtttgaaagctgctgaatagaacatgtctcacttttcttccctatgccacccacatagttgagccattctcatgccccatcaagtcttttcttccctacacgaagcatttccatttctttccactcatccatatgtatcacagtctcacatttccttgccacactgaacacagttcaatgaatctagtttgtatgaaaaattgggacctggaatcaaaaacaatgtccctagctatgttctaactgaaacaggggcaagtagaactaccctgttcttggttagcagaatgcacttcactgcattttaatgcagcctgaagtgattagatcgatgaggatgtgtcacagagactccagagccagaggcccctgggctgtgtctcatagtgatgaaatacacagcccaggggcctctggctttggagtctctgtttagtcagtgtaagcctgcagataagctgaagagtaaccaagggcaagttacttctctatgcctcaatttcctcatctgtaatataagcatatttcaaatttgcagtattttataatatttttggattttttttgtgagtattaaatgagttaatacatgtaaaggacagaaaagggcatataataagcacttagcaatcccaaatatttttaaagcaatatcagcaaattattgattcattgaacatttcatcaactcagacatgtagagctttcagcatgtgtataaatagtgtgattatatgtcccattgtgcccagggtagccctagtttttacctattgtcctggcataattaatggtatcccctttcattctcaaaggctccaacagaacctcagatttgcttattccaaatcgtatttttgcagtaggaattaatattttcctcagttgtgtgccatcctagataaaagccacaacttctctcactaaatatttaatcaattttggatttacttggaagatgggatctctctctctttttttttctactgaagtttcacctgagcccgctgcccattgctatacctcctttccttgccaagtggcagaagttagcttcagactagaaactccaaaggggaggctgtcccccttgggcccaattacctgggtttaatttgcccatcattctgttctgtgaagaccttttggattctgattctgtcattcaggatatttactaatcctcaatttcatgttattttcaagtcctttttcctagggagctgacatcccttaaaggttgctttatgtcttaatccaagtaagctgaggttacccaatggggttttccagagagggtttatataaagccctgtggaagtgttaatggttgctatgtattgaacctttattatgtgcaaacaaactgcacagtatccctcaaattaggggtgttgtgaacattttacacatgtatattccctggtcaatgtcacatcaccatgagttaggtgttatctccattttaggggtgagggaagcaaggttgtcacgtaggtagtgaggcggagagctgggacttgaatccagtctgtgtggtgaggatacctggagaacagggcaccctcagaatgaaggtctgaacagaggttcttgataacatagcctttaaactggaaggctttttttctgatgtgataaaattatacttccatatgtaattcatcattctgttgaggtctcatagtccttatttaaaatatcaattatttccataaagatgaaactattaaagcagatgtggatgaggtggaactttgggggttggaggattaataatttgagggacactgtgcagttttttttcttgtaaaacatctataatgtctatttgcttttcctcatacgaatgaaagaatatgtgcacctgtgtgtaacctcctaggcaatgaaacagttggctttctgtggaatagattggtgcaccaaagaccaaagtgccttcctttgaattattttcccactttccatagatttatattcttccctatcatgataccataatcagtgagttttttattgatttatatcagacttacttccaaagagaacttgagtttatatcactttttgttgatgtatcagcaacgttaaaaatattacttctgtattactaacatagtctattactaaaaagtaggcactataatggaatatgtgaatgaattggtgaatggccaacacatattaactttaagaatgtttctctctcacttgtgttttgttgttggtgagttgagctactttgtctctttttttttgacaccaagattttttttttttccctgagacagggtcttcctctgtcgccaggctggagtgcagtggtgtgattatggctcacttaagtgcaagattcttctaagcaagatttctttttttaaaaaagttgtgatgtttgaaagaatgagtctatttcctaaggctttggcttttggagaggtctggttagcttctttgaagatccagtctcacactgactggttacctgcatgacagaaggggtagaaaacagcctttccaagggtgagacaaagacctcttaactgtcactgttagtccccttttacaagcccaaaatagttactgaagccgctagggctgggcatttgccatattaacacctccagcttttaagtggaaagactaggagacgtgagtaccaaagtggatggaagagcatttatatataggtcctaagcatatcagagggaggaaaggctaagcccatcatttgttcctggctcctcctgctgatgcctttgagatgtgagggtcaggttgcttcagcagagcctaaaacttagtctttcccttgtagaaccttttaaatttctacctaagttataattcacatccgaaagcacaccagtctttgatttaagtatttttatatttacatttattatttatttttattatactttaagttccgggatacatgtgcagaacatgcaggtttgttacataggtatacatgtgccgtggtggtttcctgcacctatcaacccgtcatctacattaggtatttctcctaatgctatccctccccttgccccccacccccgacaggcccccgtgtgtgatgttcccctccctgtgtccatgtgttctcattgttcaactgtcacttatgagtgagaacatgcggcgttcagttttctgttcctgtgttagtttgctgagaatgagaatgagaaaaaaagaatgctcatccttttttatggctgcatagtattccatggtatatatgtgccacattttctttatccagtgtatcactgatgggcatttaggttggttccaagtctttgctattgtgaacagtgctgcaataaacatatgtgtgcatgtgtctttacagtagaataatttataatcctttgagtgtatatccagtaatgggatttctgggtcaaatggtatttctggttctagagccttgaggaatcgccacactgtcttccacaatggttgaactaatttacactctcactaacagtgtaaaagtgttcctatttctccagatcctctccagcatgtgttgtttcctgactttttaatgattgccattctaactggtgtgagatggtatctcattgtggttttgatttgcatttctctaatgaccagtgatgatgagcttttttttcatatgtttgttggccgcataaatgtattcttttgagaagtgtctgttcatatcatttgcccactttttgatggggttgtttgtttttttcttgtaaatttgtttacttccttgtacattctggatagtagccctttatcagatggatagattgcaaaaattttctcccattctgtaggttgcctgttcactccaatgatagttttttttgctgtccagaagctctttagtttaattagattccatttgtcaattttggtttttgttgccattgcttttggtgttttagtcatgaagtcttttcccatgcctgtgtcctgaatggtattgcctaggttttcttctagggtttttatgttttaggtcttatgttgaagtctttaatccatcttgagttaatttttgtataaggtgtaaggaaggggcccagtttcagttttctacatatggctagccagttttcccaacaccatttattaaatagggaatcctttccccaatgcttgtgtggcgttatttctgaggcctctgttctgttccattggtctatatatctgttttggtaccggtaccatgctgttttggttactatagccttgtagtacactttgaagtcaggtagcgtgatgcctccagctttgttctttttgcttaggattgtcttggctatacaggctcttttttggttccatatggcatttaaagtagtttttttctgattctgtgaagaaaatcaatggtagcttgttagggatagcattgaatctataaattattttgggcagtatggccattttcacgatattgattcttcctatccctaagcatggaatgtttttccatttgtttgtgtcctctcttatttccttgagcagtggtttgtagttctccttgaagaggtccttcatatcccttgtaagttgaattcctaggtattttattctctttatagcaattgtgaatgggagttcactcatgatttggctctttgcctattattggtgtataagaatgcttgtgatttttgcacattgattttgtatcctgagactttgctgaaactgtttatcagcttaaggagattttgggctgagactatggggttttctaaatatataatcatgtcttctgcaaacagagacaatttgacttcctctcttcctatttgaataccctttatttctttctctttcctgattgcactggccagaacttccaacactatgttgaacaggagtggtgagagagggcatccttgtgttgtgcctgttttcaaagggaatgctttcagcttttgcccattcagtataatattggctgtgggtttgtcataaatggctcttattattttgagatacattcaatcaaagcctagtttattgagagcttttagcatgaaggtgtgttgagttttatcaaaggccttttctgcatctattgagataatcatgtggtttttgtcattggttctgtttatgtggtggcttacgcttattaatttgcatatgttgagccagccttgcatcccagggatgaagctgacttgatcatggtggataagctttttgatgtgctgctagattcggtttgccagtattttattgaggatttttgcatcgatgttcatcaaagatattggcctgaaattttctttttttgttgtgtctctgccaggcgttggtatcaggatgatgctggcctcacaaaatgagttacggaggagttcctctctttctattgtttggaatagtttcagacagaatgataccacctcctctatgaacctctggtagaatttggctgtgaatctctctggtcctggggtttttttggttggtagactattaattactgcctcaatttaagaacttgttattggtctactcagggattcgacttcttcctggtttagtcttgggagggtgtatgtgtccaggaatttattctagattttctagtttatttgtgtagaggtgtttatagtattctctgatggtagtttgtatttctgtgagatcagtggtgatatcccctttatcattttctattgtgtctatttgattcttctctattttattctttaatagtctggctagtggtctatttattttgttaatcttttcaaaaaaccagctcctggattcattgatttttttgaagggttttttgtgtctctatctccttgagttctgctctggtcttagttatttcttgttttctgctagcttttgaatttgtttgctcctgcttctctagttcttttaattgtgatgttagtgtgtcaattttagatctttcctggtttctcctgtgggcatttagtgctattaatttccctctacacattgctttaaatgtgtcccagagattctggtacgttgtcttggttctcattgatttcaaagaacatctttatttctgccttcattttgttatttacccagtagtcattcaggagcagattgttcagtttccttgtagttgtgcgcttttgagtgagtttcttaatcctgagttctaatttgattgcactgtgttctgagagactgttttttatgatttctgttcttttgcatttgctgaggagtgttttactttgaattatgtggtcaattttggaataagtgcgatgaggtgctgagaagaatgtatattctgttgatttggggtggagagttctgtagacgtctattagatgtgcttggtccagagctgagttcaagtcctgaatatacttgttaattttctgtctcattgatctgtctaagattgacggtggggtgttaagttctcccactattattgtgtgggagtctaagtttcttttgtaggtctctggtaactttctttataaatctaggtgctcttgtattgggtgcgtatatatttaggatagttagctcttcttgttgcattgatccctttattataatgtaatgcccttctttgtctttgttgatctttgttggtttaaagtctgttttatcagagacgaggattgcaaccccttctttttttttttgctttccatttgcttggtatatatttctccatccctttattttgagcctatgtgtgtttctgcatgtgagatgggtctcttgaatacagcacactgatgggtcttgactctatccaatttgccagtctgtgtcttttaattggggcatttagcccatttacatttacggttaatattgttatgtgtgaatttgattctgtcataatgatgctaggtggttattttgcccattagttgatgcagtttcttcatagtgttgatggtctttacaatttggtatgtttttgcagtgggaggtaccagtttttccatatttagtgcttccttcaggagctcttgtaagggaggcctggtggtgacaaaatctctcagcatttgattgtctgtaaaggattttatttctcctttgcttatgaagcttagtttggctggatatgaaattctgggttgaaaattcttttctttaagaatgttgaatattggtccccactcttttctggcttgtagagtttcacccaagagatccactgttagtctgatgggcttccctttgtgggtaacccgacctttctttctggttgcccttaaaaatttttcctttgtttcaaccttggtgaatgtgacgattatgtgtcttggggttgctcttctcgaggagtgtctttgtggtgttctctgtatttcctgagtttgaatgttagcctgtcttgctagtttggggaagttctcctggctaatatcctgaagagtgttttccaacttgattccattctccctgtcactttcaggtacaccaatcaaatgtaggtttggtcttttcacatagtcccatatttcttggaggctttgtctgttccttttcattctgttttctctaatcttgtcttcacactttatttcattaagttgatcttcactctctgatatcctttcttccgcttgttcaatttggctattgatacttgtgtatgcttcacaaagttctcgtgctgtgtttttcagctccatcaggtcatttatgttcttctctaaactggttattctagttagcaattcctctaaccttttttcaaggttcttagcttccttgcattggattagaacatgttcctttagcttggaggagtttgttattacccaccttctgaagcctacttctgtcaattcattaaactcattctccatccagttttgttcccttgctggcgaggagttgtgatcctctggaggagaagaggcattctggtttttggaacttttagcctttttgtgctggtttttcctcatcttcatggatttatccagctttggtctttgatgctggtgactttggatggggtttttgtgtggatgacctttttgttgatgtttatgctattcctttctgtttgttagttttccttctaacaggcctctgtgctgcccctccttccaccaagctcgagcgtcccaggtcgactccagactgctgtgctggcagcaagaattttatgccagtggatcttagctttctgggcttcatgggggtgggatccactgagctagaccatttgcctccctggcttcagccccctttccaggggagtgaaccgttctgtctcactggtgttccaggcgccactggggtatgaaaaaaacttctgcagctagcttggtgtctgctcaaatggctgcccagttttgtgcttgaaacccagggccctggtggtgtagggacccgagggaatctcctggtctgtgggttccgaagaccatgggaaaagcgtagtgtctgggccagagtgcactgtccctcatggcacagtccctcacagcttcccttggctaggggaaggagttccctgatcacttgtgcttcctggttgagaggacgcccccaccctgcttcggctcaccctccatgggctgcacccactgtctaaccagtcccagtgagatgagctaggtatctcagttggaaatgcagaaaatcacccgccttctgcgttgatcttgctggaagctacagaccagagctgtttttatttggccatcttctatttacatttatttttatatgtagttatatatttaaaactttatcttgaccacttgatttagagtaatggaaattggagaaatgtatacagtacagaacattctacattggctttttttttcctatttaaaatgcttaaacgttctttaactcaagaactttaattttgctaataacaaagattcttaagcttagtgtgaaacatggaaaggaaacgccagcagcctggttatgaataggatcagcagtgccatcttgtggtaaataccttgaattacaattagaggcacccgcatgggatctgggagactaagaaattctactctatgctcagtgatttacatagaatgtaaaaggtatttctcaccattttaagactttgggtttatataatcagaggaggttcttcctttacaaatgtggcaaagactacagttttctacaagaccttttaatgttgagcttttaatgttacatacaattacattaaatgttactgtatgtaatattaaaaactacagttataatttcaaaaagattatagtacatgaaacattttctctagcagcagctctaatgtgtaataaaacctagtattataggttaaattggatatatctataacataataaggtaagcagctatagataagtcaaagcatggcaagtatatgatcagataataatcctgtttccttcagacctaacatgtggtaatacagtaattttgtgttctttagcttgtctgctgcttttgaaaattcttttcaacagttaacaaatattgatgaatccaattggaaaaaataatgtttacctattcattagttccaagtctgtgatagttaaatacgtgggaccattgtagtttctagaataattacatttaaaatccccagcaccttgcaaaaatatttattcaattcatattttgctttttacgttatcaacacatattagtttagagagtttagcacaaatcactaactagaccagtattagtaatccattggtaattccaagtctcacactggatcatcttgaaaatagttcatgggttactatttttttcattagttatatatgtcatgccgaatcaacattattttcagaagtcattcctctttattttattgcccttttgtgtcactttctttttcaaattataaaagtaatatatgttcatgatgcaagttcagatattaaagtaatcattcctgataaacttaacccctggaaataatcaccatttacagtctggtgtattattttcagttgctgcatttattaataaaaatattttctcttttcagttggtcagaggtaggggcaccccatcttcatttccctcagtggcactttcttccagaaaatttgctgacaatatgtttttttttgtctgctaagataactgggaatttcattaccctgataggaaattttgatttttattcctagttttgctgtttctcacttcctgcagtgttggatttattgggcactggatgacaacactctgtagtgctatacagatttcctagcatgttcagatatacattaaccatgcatagaaaggttgtagaaagcttaatgactttgcccaagttagctaacatgtgactagccacgatttaaatcccttctgattatacctgtacctaggtgaattcttctggtcccatgactttaaataccatctgtatttgagatgactctcaaatttgtatctttagccctgccttcccccctgagcatcagacttgtatatgcaatttaaaaaaatacatctccgcctcagtgccatctcaaaccttgacttggcaataaagagaatgcttgatgtcctcaccgctaccttttttctcccaaagacttctccattttagctattggcatcattagctatccatttgcctaagcacaaaccttggaataacctttggtttttctcttcttcaagcgtgacatcaatccatcagcacatgctgattctaactacgtttccctaacataagttcatctcttacctaggctaacataatcacatcccaattggttttcctgcttcccctctgtctgtcatcaccattatgtgctatcctattacctttttatttttttcattatatttaacaatatctggtattattggcttttggatctattgtctgtcttactttccttctagaatgtaagctctgcaaggcagaaacttttatcttgtcaccactgaatccccaagacctagaacactgctggcaggtaggtttcgtgttgaacctgtaaacaaacaaattaattaatagaagaagtctggtgcttgttcagtagttgggaattcaggaaaattattcctttgctggttttctcagcgctgttttgtatagcgttgaaagaactgaaaaacttttatttaataatgtgttcttgagattgatattagagtcttattatcttagatatacagtatcacttaggccttgctgaatgcattttatgctccctgagatctttttgggagattttctgtggaaacctgaaaaggaaaccatcacagtgctttctcagagaagcaaggctcaacaaatgactgggaagaaacttttgctggttgagagaggtattcagtatgtgcttcaacaatgatgtaaaagggaacaaagagaagtgaatgcaaaacatctttatttgctttggactgcccttcttccactaaggctaactttgaataaagaggaactcgataccgggccaatgaataaatttttaaaactggaaacttaaaatgaaggtttgaggatcctgaaatactatatattttaaaaaatcaatgattcttttaagaaatggaaaacaaagtgagggaagagtgggtagagagattgattggtcattctatatctagtgtaatggaaaaggtattttgtgtcagcaagatctgggttttgattctagtcttgccactagctggccacatgaccttggatgtcttgcttctgaaatctaggcttgttatttctgttggtggtttaggatgatcacatgagatgaatcttgggaaataattcttacaattataaagcacaatacaagtgtaatatattatcctgattatcattatctcaccattctagtatgaggatccagggcttcattctcttgatgttttcaactttgtggtcccagaactccaatggctacaaagatgccaagatctgaactcagagattcatgaaacagctctaaatagttttaaattacttccttgggaaatttttgcttgcttatgtgtatctgagattaacaacagtaaaaacaccttttatatagcaccatcagtgaggctttatgtctttattataaattttggagcatcctccaggctctcaaaatgaaatctctggatctactgaagagagagagagagagagagacagcaaggactttcatgtctttaaaagcaattacaggctcaggtctctgaaaaagtattaagtgccaagactgacgcctctgcaaccatttattcttgacattttttcaacttttttttaagccagactattgatgcattttaataccattagtatttgttaaaattagttcagcagtattattaatttgtcttcttaaaataaaaggcaggaaaacagtattatgcatgtatttaaataagtcccctttccagatattggaaggtatgtttttaagtattctggagaaaagtcattttaaaaaaatttccaagcagaccattttgctttagaaatattgaagatgcaatatgtgaatcatatttggattttaaagcaggatattaaacttcacagtaaaaatgattccatagttgttaaagtccaaagagaggtttacgaagccagcagacagagaaactgaaattcacttggagaggtaaatgacacaggaatggaaacattgaataaataactttacagcaatttttcttgatgttattttatcccttaaaggcagacagatcattaaaattaaaattgtattaaaaatattctctataaaaatatataacccaataaaatgaatgttgagtcagccacgtgtatttctttccaaacccataatttggatttggattggatttccaaacccacaatactaaatttatttagtattttgaaattcatatttgctaggcagtgcatcttagtaaattaaaaaatatatattcccattacttagttcatgtaaataatcctaaaggtgaactgaattggccttactgaaatggaggctcatgccagggctgaccagggaaggtgaagagaggataagagacattttatcttcatgcatttgtgtctttgcatttgctgtttctctcctggatgtgtttcccatcctgggtcatttgcttaaattcataccaattttttttagcatctatttcaagcaccctgttctccactatgacttcactaacatttctagatagatagttgctcctttctattgctgccttgtatgtaactctgttattgcatgtaacacatcatcaataatttgcttacatttctgtagcttttgtatttccagtacctaccttagtgcttgacatatagtaagaacttaataaatgtctgctgagtgaataaataaaaaagtgagtgatagctcctgatcactgcataacatagatacaactcataaagttgtgattcctggcctcatccttgtggggcaagtaggggtggtgggacagaggctacccagaagatgaacagagggatgggttgattatgcaataaaaaacattcattcagcttctggcactgtgccaggtgctgtgggggaaactgcagagatgtgaggtacattgtatctgctttcaggggtttaccagttaggtttaagggcctaatttacctgtatgaatcatctagagggaaattgaaggctaagttgtaagacttgactgtgtgtctatgaggaagttagaaaagttagaaacccacatgagttgaaggagcttggaaaggcttcatgaggagccacaagttaatttgggctcagcagtattgactgaaggaagggctgatgaagtggcaagccttgggctaggtgggagttgaatgggtggctgtgtgggaattggcttgtggagcagtgtttactctgggagaccacagacactttctacacctatggatggattttagagatgctttgaacccctggaattatttgcaaaatgttgtatgtatgtttatatgagcagttttccagggagaattctcagctttgaaagaagtagatgcagattttaaaagaatgttacgttttgtagttgtaatcacgaataggtagcattatcattatttatcttttcatgaagtcttaaagaaagggaaaaaggaagaattcgatggggtagggaggtgaagggaggagggagattcaggctaacaatataggtatcaatatttattaaatgatctttccctgaaagtgtatcactaacatgctgtatctttagctgattgtcaaaagagatcatctaagcgatggaggctacactgcctgtttgagagaaactactgaactaaaagtgaatgaaaatgtatcccattgttgcccaaatgaaaatatacttaattcaaaggcagaaataatttttaaaaattgttagtgctagaaagatgaggtacttataaaaaaaaaaaagaatgtatttcaaccagatcatgtaaaagtatgcccattctcccactgatttttcttctacttgttaatagttttgctttttatacttagcacgttagcatatttgaagtttatgacatcaagtagtgactcaagttattttaatggaaagcaagtcatgttaagatcacttcttgaacaacttatgcttttgtcattgacatgatatgcctaattgaggtttatgttgtatatatcctgattggggttcactgagatttttggatttgtagattaaagtataaattaaattttggaactttaaaaaataaaaataaaaaataaaaataaaaattgttagtgctttaaccagcaaacattattttttaaggattattctatttaggtttttgaatgtagggatttgcctcataatgaaaaatctgcatttcatcataaaaactgaataaaatgaacatgacttggttatttgccatagatgcggattcttttaatattggatgctcagtttgtatagaaaacatttggattggagcccctctttgggccattgccaactagaggttaacatactaatatatcagagataggagtgatggatttctacttctgggtgagtgttacgctatcacatgccctgaagtgatagctctatcatgttgcaattgtgagttaaggaggaaggaaagagatctatgaaaaaataagctgttcctttgtttcctggcttgttccaaaaaggattgcaataaaaaagagtttcatattattggtttatgtaattgataagagcccagtaattgaggaacaaaaaagttgttaagtttatgcaaacgaataatacaaaagggattttcccataattctatctttaggagagtaattaattggataatagttaaagaagatagtaatgttgagagaatgaataggtatataaacctcaattatatcttaaacattagtaagccatatttttacatagaattcagtttaattggaggacctgagaaatttgttgacactggaaacttgtgcatttttgatttataaacctgaaatatgcataactaatgttaatttaataatgttgaattttaatagccttaaagtcaagcattaagaaaaatgctcagatcatacaattttatgagaaatagactattcaactcttaatgattcaacataaagggccacttcagtgaatgttcaaaatgtattatcacttctgtggtgatctaatcttatttattgaatctggtaacatatatttatgtatatatgaatatgagaatcttaatatatattttaatatatatattattacattattctgtgtaatatactttttgagttcttaatatcttatattttctataaagtcatatatgtggcagatacatatatggagatatttcagattattgtattgcaagctgaggaatgtagtatcttcagaacttgccacttgctagggacgaggttggaatgagaaagtgtattggcctcatggccattcctaagtcttggggccgaaggctggaggttggccctagtgaacaaattacttggaggatccagaagtggctagtgcacaggagacagtgcaatccattcccaatggggagcagtgggtcatgactggatgaaccatatacatcatcagttctgaaaatgaggctgattaaagggcattcaggagcagggtgaatgaagcttctctggggaaggagagaaggtccaggcctttgtaaacaggattgagttttctaggttgcccagtcccaggttgactttggctggaattaaaagtcatggttcaggtagttcaccttttatagtttcgtgcttattaacataaatttacttttattttgaatacattttgctataattagttaaaacaattatagtaacaagatgcttaactctcactctataaacaatagcattatgaagggaatatggaacaaacaacaatctatttatgaagaacagatcagtggttgcagctagggtgggagcagtgactataaaggggtagcaacaggaagtttcttggggtcatggaactgttctggatcctgatagcggtggtgtttacacacatctatatgcattaaaattcatagaatcatctgccccaaaagtccatttaactatacgataattgtttttaaaaagcaaaaaatgctagcagggagataaaaaaaatttttttttttttttgagatggagtctcgctctgtcacccaggctggagtgcagtggcacgatctcagctcactgcaacctctgcctccgaggttcaagcaattcttctgccccagcctactgagtagctgggactgcaggcgtgtgccaccacacccggctaattttttgtgtttttagtagagacgggatttcactgtgttagccaggatggtctcagtctcctgaccttgtgatctgcccacctcggcctcccaaagtgctgggattacaggcatgagccaccgtgcccagccagaaatgtttaatatatcaaatatacacaacagaacaaagtaaatcctaacagtcctagaaggctataggaaagccagagtcctaaaagtatgccatttgcctgtttctgaatgtcttaggttggtggaaggcacattttacctggaagctgaaaatgatttggtcccctagttcttcttttatcttgctttcaaaaatagacctgtcttccttcctttcttctttcctccctctcttctctttctttcgatcattcctcccctccttactctctttctttcttaagttcatgctatctgacatggtgaagtggcattctagattactttttttttttttggtcacaagtgcctactggtggaagggacatgaagggaggatgagaagctggtctagctctgctccaatcctgagggtggacagttgagccagaataaaaccaaaagtgaagcctcactgcttaccagaatacacttgtgtagtgcctacactacctgtaggccttcctgtttcaggcagtaaagtgttgttctggagctgagcacctgctttgagttagaattgagacaggcaccagaagttggatgcagtccagactgatcagaggacccttggaatagactttaagttgaccttgaccctttagtcttctttggattggacttcccaggattactctgtccctttgaaaaaatatatttgtgtcttgggcctgaaccaaattttaatcagtctcctagaaattgtgaagggctgctatggcatggcacaacatggcctgttttctcaatattgtctctttaacttctcatttacttggcaacctgatttctgattttctgaatgggtgttgctgtggacatttgcccagaaaacagctctgagtgagggactatcagagagaattttatgtctcttgggaagggaaaggttaacttttatttccaagaggactggctgcatgagttcttggatgcagcagtccccaggagagtgcggtgtgttgagctgtggctagtgtgtgtagttccacacaggcaggagtgggctgtgcagagctacttgtttacaacagcttcctgaatctgctaatgccagactgagtgaatgaaagattagtttgaagttcttgacccatattctttacattaaacattgatgaccattttttctttcagtccttcctctatgttattctggatttgaaatctctagctatgagataatattaactgaaattcttgacatttgccaaccctagtcacaacccttgctatagatcatttcaacataaagcatttgtcttttagcttgtctgaaaatatactgcagtatgttgctggtggtaatggatttcttggagttgaaccattgggtagaggatttgtgattggagtttaccatctgatttatatgttctatggtcatgataactcagatttgcagatctgggtactactgggactgtggggctattgtgcctgacttaattgcatatttaaatgtaaggctagaagtaaagctgaaaaagcagatggatttggaaaatgagattgtcctgttttgaggtcatatggaaagccaagaaattgctggagcagctctgacagggatttcaggaaaacaggctggtaatatttccacttctctcagcttgcagtctggctgaaaatgtagtaagatcagccttttccaaaggtcttggtatttctgcagctgttttcagaaagccttgaaagtgaaaagcaaaggagtccacagaatctcaagtatccatgctccaatcactaaagctcttggatgatctaagtggaaaagagctgaagccatgtaagtgaaggtgtgtatgacacagttcatgtgtggagtctgctctttcagatatgacatcatgtctgtggcccccaaaagcttccaggaaagcatcggcttgacagcgaggatgccaaaaagtccttgataggagctctgcacattatatttccaccttctattattttagattcttttttgttccattcacctaagtcagctgggccatctgcctaagccagccaacatctcacattttctaattggtctagttagtccagggttaatatgtcacttactatcactaatgagagactgtacttgctagactcgtaaagcatttttaatgaatgcttccagtattatgattcctgttctacagaaaaagaaaccaggtttcagagaatttatgtgatttgtacaaattatttgaacagattagtggatcatgagggctatggaatgtatattttatactgtcagccaccaactttcaagtggttgaagctctccacatatgtaatgtgtttaaaaggaagtttaaaataatagaaatgactagattgtgtcagtgatttttaaatattctgcaaatgaaacttaagtaaaagttcaatatgttaaagctacaagttctattttagcatgaatttatttcacaagttcaggtttctaataactacttatcttcaaattaaccagtaacattaacgaagctatttatgaacacaagtatttgaaatctagatttgtagatgtgagttggagccttaatatctaatatattttaaagttttgttcggttgtcccccactgaaaaaaaaaactgatttacagataaattcttgaaaataggtataattttcttaaaagctaagcctactgaaaatattattcaatctgattgaatcagacacttgagaaattattaacaggtagttttggacccactttgaatcactatctaactatacctgaaaatattcatttttcctcttctctcctaagcccagtccaattaccatcctctgaaacagcatttgtcaaggtccctagacctctgtgtagccaaatctgtccataaattctcagttctcacttcatgggacccatcatcagcatttgacactcttgatcactccacttactctccaaggctcgcgctctcctggctttcttcccatctcaaaggccacttctcagcttcctttctgtgcccccgtcattgtcctgactatctcaaactccctatcagtccttttcaaccatggtttctcatctgaaccaaggacacaaaaaatgattccagagaatattttctcaactttttccaaggaaaataactagttctaggtgcataggaaggaagttaatccatcacatacaatgggtgccttagggctttgtcttaatgtttcttcacataacctcagttgacaaaggttgccaggctcaatccacaaacattaggcatctgatgcattttcatgaccttaactccatctatatattgacaactcccaaatttatatctccagcccaggcctctatctgaacacaagataatgttctctccaatttgatgcaacctcttgtaaatatctgacatctcaaacttctcatgttcaaaaacaaaacccgatctttcccccaaaaactgttccactcagagttgtcatctctcaggccccaaattttagtcatccctgaacttctggtctttctctcacatctttcatccaatcctttggcaaatcctactgtacctatgtttcaaatacatccagaatctgaccaattcttgccacctttacttctaccaccctgacctaagccacatcattctctagagcttgaactattctagttgcctcctaattggcctccctgctttcattgttggacctctacagtctatttcaaacacagcagccaaattgatccagtcctttgctcaaaattctccagtagctcccaattacaatatgtatggtaaaagctggaaaccttacaatggcctacgtgatctgtagtgcctctttcctgactgctgcagtctttttgctgttcttacaatacattgagcaacttccacccagggcactttcccctgctcccgccccaaacccccatggcttactgctcatttctttcaagtctttgcttagatgataccttatcagtgaggcctttccctcccaaccttttaaaaattgtaacggccctaatcactcactatccccattccattgcttatttctccctattgtgtttattattttctaatattttacatggtttgcttatttatttttattgtcttccttttctactagtgtgcagtttcctcaagggcagagattttgtccatcttgtccactactatatgccaagtgtttggaacagtttgcacggaggaatggttcctgaatgaattgaatgcatggtgagcgtttaatttgaaatttgaaatgtgattaatggaattttaatcattttaaattctccttgtattgcacaaaatgcttcttaaatgcacgttgtaacatcatgagatagtcaatccagatacctcagtgcccactcctgctaaatatttactcaaaggttaaaaaccgtcattggttttgtatgctgaggccaaatttgaatttttagttgcgtgctggtacttcatctgcagatgtaggtatcatgcatttcaaccctacattgctaagttaatctaattgagtatattgaaaatatcagtaggattccaagtatctcagttctctcccttccccactgtactctgtgtgagttgtagcggggctggtccctgcaggttgcatttctcttggttgggcatctttctgtctgggttgacctaattgcaggcagtaatgcatgatgagaggcagcttggagaagccagggtattttcccctccttgtctgctgctgtcagcttcctgccatggccacagcttctgtcaagtgattccatcctagtgtgtgagccagctcacaccagttcatgagggacaattttgtttatttttttcaactccacgtttatgtttttccaactccatcaatatcacattgatgacttaaaataggccaaatcctggctttccactgacagagaaccaatttgttaaacattgaccagcacaccctggtgggctcagcccttgcgttctgtaacacccctttttccttttctctctggtctaggagtggtagtggcttccaactgttgctagtccctggcttattcactcttccctgtttaggactcaattccttggtcacctttgtaaagaatttcctgcattaattctcttcccttttagaaacaggaaatgatttctgttttcctatactttgatacaatgcctaaaatagaacaaccatgctatgtttgagtgaacttgagagaacctttagcagcaatacaaaacaaaaatctttgtctcatctgaaatatttgcaccagtgccttgccttggaacacataaaaatactttgatacaaaaagtaaatttctgatctcattgccaaaattattacacattattttgaaatgctacaacttaaagacagcactctaatatagttaacacttaacatgacattatccaatatagttttaagagatgctgccattttgttacctcctaatacttgtttctgaagcttataggaactacttgaatactttttttcaattgcttttcttataagtcattttcagttgctttcctatgggttactcatcatttgtagacttggtcacgttgtgaatgagttacttcatggtatgttcaaagtcatttaaataccttcctctgttttgatgtatgtattgagtgtttttcaaggctataaactcccttaggtttggccacaggaacaaagtgtacaaaaatggagaataggaagagctataacatccatactctcatttagttgaattataaagattttagctgtcttattcatcacatatgttggatgcccagtcttgggtgctgtgagctgtgatatctgacaatggtaccaatatttcagaggcagggaagcctggtcatttaacacattcactgtggggtcagtagctcaggaggtaatagggttcacccagtgtgtttccttcacatgtgttgatgtaacttaccctgaacaatgtttttaaattcatttttaccatttaaatactactggtccagactgagtaagcatccttgaaactatattgtagtcccatctacagtcctacatcaaggcttgttccaaaattgctccaggtcgtagacttggactttaactccatctttatctctatgcccaccttacagagtcctctaaggaatgttctagagagcccatctttctgtataatcagtctatttagagtggagcaagtgatgaaatttaatgtgaaagattccttgattttcatattatcctattgtctgaagattctgatcaatctaataaatatgcaggttaggcctagtctggttttctttatccaggatcccttctatccccagctagagccactagatcactaaatcaatcgtatgtgcaggctgcctctgatttatttccctcgctgctgctggcctgcccctgccttttagccctgattggaatgtttcaatgtttgctttgttctaatactctgtcccttgtactctcttttaaataaccagcctctgactgtcttggttcttgtttacccaccttttcatcagccccttcctcattcttcaagcccaaattccagcttgaagtctgggttctacaatctgttgacagacttcctcgaagcttatgatctgcattcctgaccttcctaggagtgtctacctcacaattttctgatgttatgttgtgcaatgacacctcattttgtttgtttttgctgttgctgactggaccattgtatatcagatgtggtgttttgcctgccagaccaagccttcccgtattgcatgggagtatactagtggctgtgaccagactgattttaagttctaatccctcttcccactcctaccctcaacctgctcagacctgacaaagtaatagggaattgcccacccatttaagtcccataaaaagccatactgcaccactagccacttcaattatgatgagtggttttatgggaagaaaggaattgtaggctgatgatagtagctttgttgagttggtagcactggatccagtctctgagggaaacataatggttggatttcaactttgtagtattattccaggagcatctgtatagtatcataaatatgggatctcacatgacgtcttcctgtgtctcagaaaaatggacagaaagcaggtttcaataatctttttttttttttaatttgactttaagttctgggatacatgtgcagaatgtgcagttttgttacataggtatacgtgttccatggtggtttgctgcatctatcaacctgtcatctaggtttgtttttttttttttggcagagtctcactctgtcgcccatgctggagtgcagtggtgtgatctcggctcactgcaacctctgcctcccaggttcaagtgattctcctgcctcagcctcctgagttgctgggattacaggtgcacaccaccacacttggctaatttttgtatttttagaagagacggggtttcaccatgttggtcagactggtcttgaactcctgaccttgtgatccgcccacctcggccttccaaagtgctgggattacaggcttgagccaccgtgcctggcctgtcatctaggttttaagccccacatacattaggtatttgtcctaatgctctccctttccttccccctgagcccctgacaggccccggtgtgtgatgttccgctccctgtgtccatgtgttttcattgatcaactcccacttatgagtgagaacatgtggtgtttcgttttctgttcctatgttagtttgctgagaatgatggcttccagcttcatccatgtccctgcaaaggacatgaattcattcttttttatggctgcaagattaaagaatcttttgcaacagatggggaaattgagatttagattgatcaattgttgcccttgagatcacacacagatttgttgataggatagatcctaggttttggttttggggaataacaatccactgtcccagggacttccaaccatttgatgaaagaatggtttttagttctctgaagccttaaggtaatttaatttcagagctggtctggaactgaccttggagattgcctggttattagtctaaaccctcattttcaaggtactgatgacagagaataggaggtgtgttccatttccctaccccggattgtatgactgatgggaatggagaggtagagtaggacagaggtgtatggtctatcaagaaaggcttgaagtcctctctcaatcttttgtgcaaccagttttattaaatggatggaattcaatgggaagtgaaatagggaacaacctctacccaaaatcccaccccaccctccactgccttcaataatgttaggctcttaatttttccatttttcttttttaaaataatattttattggccgggtgcagtggctcatgcctgtaatcccagcagtttgggaggccaagacaggcagatcacaaggtcaggagttcgagactagcctggccaatgtggtgaaactccatctccactaaaaatagaaaaattagccgggcatagtggcagccacctgtaatcccagctactcgggaggctgaggcaagagaattgcttgaacctgggaggcagaggatgcagtgagctgagattgcaccattgcactccagcctgggtgacagaccaagactccatctcgaaaaaaataaaataaaataatattttattgttttttgcataatgtctttattttgcagaaaatgctttctgcttattgtctttggctactttgtcaaaactctaggtatgtcaactctagctatgatacctgacacaaaagaagcctgaacattacttgaaagcaacaaggaagagaatgaaagtttgttttttatctcactaaagtagggccattgtttacaaattctggtatgccaaagtcatctatatgctatatgagaaacaaacaagaagtttctggaccctagtgaacagttttttttttctgtgaatcatggtgaattaggcccaactgcattgcttccagccttgaattcacctagatgactcaggacaacactgccactgcagattaccagcaaagtgggaggtggtgatgggactttttgataaatagtagaatatgtattccttcttctattttaaaatgaagttaataagggtttatttccttcctttgacccatgcgactgccattttatacctagtagatccatcagatgaacgctggttgcaaagtcattgcatatttcaagacataggtcttgattcacatggaaggtggtgacatggctgtctatgaggctaccagtaaggttgggctgaggcattgtactggctgtcaggcgtgtctgtgtctgtgacagtcccttcatacagtggggatcctagagctagtagatggattggtgttatgactcatggggcacatactgatgtgggcaggcattcgaggctggaccaactgacaggggattggagcatggataaacacacagatgaattgtcagaattgtaaggctcttgtatcggtttgaaccctgaaagcgcaccaacgaacaacacaaggcggtgtggagcaacacgctgttttaatgtgtgcctgggtgcagacgggctgaggcttaaaagggcatcagcaccaaatgcggacagggcagcagttttatagtctcctgtaaacaggaagtgtctcagtctgatgtaactgctatgcagtacctggacagcagtacctctctcggtcttcagggggtacatgtcttccggccagttctcttcctgcttctgccatcttgctgacaaacactgttggcacaagtggtcttgtgccttgggactaggcctcagaagtgaggagttattcaccaccacctccccccgccggcttccaggccctggggaaagtctttcattcttgtctatttggttatagaaaaagggaaaagcgacgactttctcaataactacttcaagcgtgacatagggggtggtgtggccaccttggaaacaaaaacttaattttgggggtatttttgagagatgggttggtattcatcatgtcgttgcagcaggagcatcgtctggattgtctggtggttaactatggtttcaacaagacttttattagcttttattattagtgggataatacaggggagaaacaggaggagcccagtgatgaagattactgtccctaccagcattttaaatcctcttaaattagagaaccaccctcctagaatgtttgttgggtcccatcccttccaggtttggactggtacatgggctacttttctgatgtttgaagcgatttatagtactgtttttccattatcgtctatgttaagacaacaattggagatattaaacttaccacaaacctcaccttctgaagttgtttggaactacccacctggagaaagtacagacaaagactagaagatagtggagctgtttatcgggtgggatgtgagtgaagtctacttgccaatcttgcccaggtacctgtctctgggcttggtgggtaggaaaaggcagtggctggagggagccctggggtgacactgagtggcagatagagcaggactgggtgatttcttgaacacagctggaaaggtgaggacaagtgagaatagggcggagaagttgtaagagaggtttggaactgacatggaaaagttgtggagactttgggggatagggattgtttgagagtgaggaagaacgaagcgcccttccttgacctaccatggtccttgcttttgaaggttttgggctcagaagtcctccttttcttccgaggattaaagaggagagaacaaggacagggacaaaaactggccttgcacaggttgtaggtgtacttgtttggctacctaatctgctagtgcatttccagctgctataggatcgtatggagtttggtggcccctgcaatgaatgatggcaactttctgtgggagcctggcagcttgaaggagtttgttgatgagagagccatgtatgacaggagtgttttttgcagttaggaaacgctgttctttccagatggaagagtgtgagtgcactatgtggaatgcataatgagaatttgaatatatgttgatctgttgtctggctgctagagtgagagcttgagtgagggcaatgagttcagctttttgggaggtggttcttagagggagcatattggcttcaatagtgtgtggggggtgacactataaaatagccagcatgttggtgtccttgatgtaggaaggagctgccatctacaaaccaagtaaaggaggcatctggaaggtgttggtctgttaggtttggaaaatgtataagaaatgtttgaacagtgttcacacaggagtgcgtagggtcttgggtggttgtagcttcaggtaagagtgtagccaggtttagacaggagctggttagcatggtgatgtggggagtttctatgaatagagcatagagttggaggagctgttgggcagagatgagacttagtacactgcagtgagctagcatgtctttgatgttatgggttgaataaactgttaggttggcatgaagagatagttttaagctttcaagggtgaggatagcagctgccgccaatgcttggaggcaggcaggccatccaagaactgtggcttcaagctgtttaggcaacaacctggaaggtgggtcccttagactgggttagaacacttattgcaactccacatcattcattggtgtagaaggagaaaggtttggtgaggtctaggtctgggagagtgaggacgggggctgaggcgagagccttctggagtagacggaaaggttaggtaataggcagtgcagggtttaaaggctcatggagagggcctttagtggcttggtataacggtttggtgagtagagcgaaggagggaactcagagcctaaaatatcctgctagtcctagaaaagagataatttcttgcttagtttgtggaggtgggagggactggaggagggatatgccatcggttgtgagccctcgggtttgcggggtaagagctaggcctagataggtgactgggggggtgcttatttgtgctttcttaggggagacctgatgcccccattctgccaagaagtttaaaagagagatggtatggacattgcagtctctttgagagggtctacataggtgtagatcatcaacatactgaaggagagtggatggttttagggataaggtacagaggtcacgagccagggcctgcccaaaaaggtgggggctgtctctgaaaccttgagttagtatgcaccaggtaagctgatgtgaaaggtgggtgtcggggttttcccatgtaaagacaaagaggttttgggaatcagggtgtaaaggaattgtgaaaacagcatcctgtaggtctagaacagaaaaacaggtggtgttggagggaattgcagaaagtaaagtatatggtttaggaactactggacatactaggggtatggcttggttaatgagcctgaggtcctggactaagcaataagttccatctggctttttgacaggtagaattgatgtgttaaaaggggagtctgttgggcagagtaggtgactgacaaggaggtgagaaatgataggctttaggcctatgagagctgcttgggggatgggatactgcttctgtgataggaactgggtggggactttaagagtaacgtggacaggggtgtggtgttttgtgattgagggtgtggaagtatcccaaacagtggggttaactatggatgggggataaggaaaggttgcatgttttaaggtgggaggttggaggagtagaagaaagttagaagccccagaggggtctgggttgatgcgttgggtactatggggaatgtggaagtggagagtagtgtggagttttgaaaggatgtctctacttaggagcagagttgggcatgagggcaggactaagaaagagtgagtgaaggaaaaggtgtgcagggagcagaaaagtggagaggtggctcggggtttggagacttgtccatcaattcccacaacagagacttgggaggactgggtgggtcctgaaaaattaggtaaagcagagtaggttgccctggtattaattaaaaaacatactggcctacctgccaccatcagggttacccttggatcacatgaagagatggtagttgccggggtgtctgttccagggcactgtcagtcttcagcagcaaggctgatgagatacgagtaggaggttttgactggctcaggaagggatgggggcagtccttgtgggggctgctcacagtctgacttccagttgggtcctccacagagggggcacagcctggtgggcttacctgggtttgggcattgtctggaccagtggccttcattgccacacttgaaacaggcaccaggtggaggtggattgctaggaggcttctgtgtggagctgcggccccgtgggcccacagagcccctgatggcagaggcaagcatttgaaactctgcctgttttttgccttttacttttctcatcacgattgttaaggactttgaaggctaaattaagaaggtctcgtgtggtttgaaggctgtcgtcaagcttctgaagcttgcgccaaatactgggggtggattgggagatgaactgaaggtttaagatagtggttccttctgggctgtctgggtctaggttggtatactttctcatggcttcagttaaacgagacagaaaagggctgggtttttgtcgggaccttgggtgatttctgaaagcttttcatggttgactgctttatgagcaccctttttgagtcctgtaaggagacacacaatcatgtggtcttgatggcggcgtccaggggccctgtcttgataatcccagtggggggcctggttggggactgcctctgtgtcactaggctgggcaggagcttggtgatgaattgtatcagcatgcgcctgagctagggtccagatacggtcccagtcttctggggtgagggtggaagagaggataacatagaggtcatgccaggttagttcataagactgggtgaggtactgaaactctctaatataagaggtaggatcttctggaaatgaaccgagtcttttgttaatttgagagagatcagtgagggggaagggaacatgaactctaacaatatctttagttcctgctacttcccaaagtgggcactctagcacaggcgctgaagtaagcgtggggcatgggccaaagatggcacctgagcgagtatgggaaggagagaaggaagagcctggaagtggttcctgctgagggtttgaatggggaaaggggggttgagttaacaggcagtggaagataggggcgtaaggtggcgggatgaatttgcaagcctcaggagagggcgctgggggaggacaatgggtacaggcaattctagaattgtcctgaggaggggacggtgtagaaaaagaagtgaatacagctgactgggaagatggcagctgggaagatggcggctgagaagctaaagaggaggcttgggggttaaagaagatggttgagaggggagaggtaggggctgggagaggtagacagcagactgctggatcaaacaaggaaaaagaggtggggtggggaggaggaaggcgatctgggtggtgagaatggaggagaatgatttgaacaggtgagcaagaattgcagaggtcaggttgtgatctgagtgcaaaaaggcctggacataaggaatttctccccatttctccagttgtcggcaataattgcttaaattagttaaaattataaagtcgaatgttccatttgtgggccatttggacctgttatgtaattcgtactgtggccagattgaattgcaaaaaaagacaaggcgcttagggcggatatcttgcatgaggcctaaggtctgcaggttttttatgaggcagtctagaggctgccttttggaatggaagactgggaatttcccataacggagggtaggctcgggagaacagggaaaaggagaccatcctggacggccggagggagatgataaaaggagcgatcgtcactgctgcctttttcaaggccttgttcatgttcccttccccctcactgatctctcccaaattaacaagacttggttcatttccagaagaccctacctcttatattagagagtttcagtgcctcacccagtcttatgaactaacctggcatgacctctgtgttatcctctcttccaccctcaccccagaagactgggaccgtatctggaccctagctcaggcgcatgctgatacaattcatcaccaagctcctgcccagcctagtgacacagaggcagtccccaaccaggcttagaggcatccccctaagaccagatgatcagtgagtgcctggcacatgccagagccttcttggaccaacattggatctttggattggagaaaccaagagaggccacgtggatttttctctgttaacgcggctcctgggaaatttatcagtagatgagatcagtgactggtgtgcatgcacagagaggtgactggaggctgaggagcttcctttgtccggttgctgtggactaccgtccagggtggaaggacacaagggacgcggaccggggccccttccagatttcggcaccagatgtaaggctcttgtatcagtttgaaccccgagagcgcgccaatgaacaccacaaggcggtgtggagcaacgcgctgttttaatgtgtgcctgggtgcagatgggctgagacctaaaatggcatcagcaccaaatgagaccgggcaggggttttatagtctcctgtaaacaggaagtgcctcagtctgatgtaactgctacagggtacccggacggcctctctctcagccttcagggggtacgtgtcttctgccggccgtctctcttcctgcttctgctgtcttgctgatgcacgctgctggcgcaagtgttcttgcgccttgggactgggcctgagaagggatgagttattcaccccctcaccctcttcccgcccagcttccaggcctcagggaaagtctttcaagaatgtgttggagaactgttccagtgagcacagggctagggtaggaggatgaatgttggttcctcagggcagggtacctttcacagctgtatgtggaaggaagtgagggaggcctccaaactgaggatgggggttggcaggtggacagaaggtactggttctaggaataagctacccactgaatgggagttcctagattggggttcttcctggctgccttggagttcttccatcatatctttgtaattgcttctttcctttgcatccagggaagcttttgcaaatggattgtgtttaattttcagctgtgagctcttcattctgataagctgtcacagttatttatgaactaggtctcggaaagcaatggctagtgatcatgtgttgtggacaccccactctcactatgtgaattcgaggctggtgcttattaaggagtttgacataatcaggccccctctgtgtagctagttgttgatcttgactttgctgagggagatggacaccttcatctagtagggccctgagttgggggaattgggctggatgggcacacacctgagcacctgcagctcaggcttgccctctggcacccattcctggttcccactcctggttttcttccagcgcttactgtgggcctccatgaagtccagcaagaaggagtacatggctcttaaagccaggccagacatgcttggcactggaaacaacttcctggcattcctggtggtgatcatgtcattggtgagctccttgaagcatagccacaacttgctctcctccaggcctatgtgccactttcactctacatggtcacccttctcaatgcctggcttgttgctcacgcttcatggctctcagcaggtggtccactcggtactgcaggctcttcgatgcacactcttaccagtgctgtgggagctcattctcctgcctgcctcccccgcacccccactttcttctaagccccaacttgctacttgagaaccatctttacctctccaagacctatgaaggtgcctgggtccctgtatagacttggaggagggtaaggacggagatctggtcaggaaaggcactggtggtaagggggaaggttatcatacttgaactcctgaaaggcatgactagggcagacctcttgctcttttgtttttgcatcccctgttttttggcaggtgtttcccaggtgtattagtccattttcacactgctgtaaagatactacctgtggctgggtgattcataaacaaaagaggtttaattgactcatagttctgcctggctagagaggcctcaggaaacttacaatcatggcagaaggtaaaagggaagcaaggacattcttcacatggtggcaggagagggagagagcacacaggggaaactgccacttttgaagtatcagatctcatgagaactccctcactatcaagagaacagcatgggaaaactgcccccacgatccagtcacctcccaccaggtacaatttgagatgagatttgggtgagaacacagagtcaaaccatatcaccaggatcacagaagtagtggaagtggataactagaaggaaaagggcaaaaatcccttgcttatctgggtgccatctttctcttggcccttgatgctttccagatgtgacatgcttacatatgtcttctctctcctgagctacacttctgcatctttggaggcctctcacttgggatgtctctgctttacccttctttgaatttatcctgagctcctgctcctggaggttgaccccacaacctgttattgagtcagcccttttaggccgggtcacacacgatgtctcaaggctgggttaccctttgcagtgtgcactcagatcctgggcaactcacatcgttatgcaaagggtagcctgctgcacaccctctgcactctacttttgcacactggttccaaccaactcttcagtgagaagcagaacccaagctctgtgttcataggcacccagattccagaggacatctgtcattttctctcatgaactgtccctggatgtagttcaatgacattcagcccatggagcctgcagtctctcccagcctcagtgagcagttttctgggagccctccaactctcccacccaccactgcacttaatgagtatgtaggaggtgttggggggtgaggtgacagagaagcactctagagaggagtgaaatactatagcccactcttactgggtctttccaaccgcctcttaagattagtaaggttgaatggggtacaaaggtgagagtctaggggcctttagttttccccttggaaagccttggaggggaattcattccatgtcctgttataattatctggagaggtcagctctacattcaattgaacctgtgagtggatttggcaactgtcttgagcttagccctggttgccataactcattaagtttctcacaagcatttactatgttaacagaacgctgggaatggggtgtgggggcgggcggagaagaagaagacattcacagttaacacctctgatgacatctctgatagcaaatagatactattacaagactctatccacccaagagctaaatcgttagtcacagatgcaaagtgctgtgtggtcttgagtaagcctctcagttttcccatctataaatctagagtagcagtgcagatttacttggcaaggtttttctgaggattaaagtaccctaaatcatgtaattaaaatgaacataaagtattttccaaatttgaagagccatggaaatgagaaaaataattactaagagacccagtgaggggctatgtttgaactgttggccattccttgggcagtagtaatttcctggcaggaactggcctgggagggcccttgacagatgttgcacagaactagtttaagaagggctgactggcatgtggtttttattttatctttgtaaagctacagtgtgaggcctgtgacagcaggaggaggccgtgaggtattcacttgacagcctgccattgtcaactctaatgggagagaaacttcagtggctagaagggcagcctcaggttgtaagcgattcatttttagttcagctgcaataactcctgctggtgatttaatcctgtgacttaggaactcttcgtgtgtgcttgagtgaatgaataaaagagagacagagtgagagagagagagagtgtgtgtgtgtgcacgtgtgcacacatgcacacacattcatgtgaacaatttctattcactcacttgtgattaccaatgggccacattctatttaggttttggaggcttggcatgaagcatgttttgctaggatgatttgttttttggacaaggaagctaacatggtaagtcatatgataatttagtttatgtcttcattgttgcagagtttggctgatagcaagggcagtcgagaatgatagtctcatatagaccttaatcccagctcctaaagtagaatggaattgtggaaatcaagttttctggtctaaaataaatgttttgtggcattcttataaaaggaacaggttgaaaagtccctgtggaatcttaattttgccactgcagattattgaagaccccaggtgagcaaatcaactgtgaggaggtgatttttatcagttggcattgaacagaccacagcatagctatcacctgcatggccttcctttgcctttgatgatcgtgtgtgtcagtgggatggaggattttttttgttttgttttgagacagagtctccctctctcgcccaggctggagtacagtggcatgatctcggctaactgcaacttccacctcccaggttcacgtgattctcctgcctcagcctcccgagtagctgagattacaggcgtgtaccacaatgcatggctaatttttctatttttagtagagaaggggttttgccatgttggccgggctggtctcgaactcctgacctcaggtgatccttggcctcctgaagtgctgggattacaggcatgagccactgcacctggctgggatggaggattttaaaaggagttgtattgcctttttgaaaaaaaaatctagaggcacccccccccccccgcttttataatgacccttttgactgaaactttatcttaaaaattccaggataagggataaattagccagttgaatgtgatttccatgtgctataaattttcatattctcccaaaattcctttctcaatgcgatggcatttgggagtggggccttttggaggtaattaggtcatgagggcagaactctgatgaatgtgattaaaggccttataaaagaggttccacagagatccctcatcccttctaccatgtgaggtcacagggagaaagcactgtctgtgaaccagaagatgggttttcactagacaccaaatctaccagagctttgatcttggactttccagcctctagaactgtgagaaatcatttctgttgtttataaaccattcagtttataatattttgttatagaagccctgttggactaagataccatgaatctagagatattttgcatattttattcaccgctgtatccctaggccctagatatgacctgacatttatttaaggtgctcaataaatatttgtttgatgaatgaatcaatcgaaaaagggctataacctcctattaggagtgatctctgggtattggctcatgcttgccttttgggatcatttgcatggatgtcataagtgctaaaatcttaagccacgagaaatatggagcttgtttccaccgcagtgattttctgtgaaatcactacccaaagatttttcacgctttccaaaaatattttttgaatgaacacatgtcatgggtggggaagttttcctcttattgggcagatatttattttcttatttcatgcagatgcccctgtgatgttaacttaaccctactactgggttttccatttttttgcatttgaatcatactcaaacccatgccagagaacaatgcagttcagctttctgatgaccatgtacagtttttgcaaggtggtctatcttgtccctttttaaactgaggactaatttagtataaaagatcatttagagaacctattccatctattctagctttgccagcatgcacagaaacacccaatgccacaaaatcactgaaatgagactcacacaccaggattaagggaagatgatgcttttgatgaaacattagtgaacaaatagaattttagaatcaatgataatctctgcctcattatgtaatttaagccccttgatttgtacctgaggaaaccaaagccctgtggagcacagagtaaggacgtataagaactggagttaagacttatgccctctgactgacagtaaattctttccatagtactgtcacagcatgccacagggaacaagtgtctttttatcttttaataactgtatcgaatgcttaaggccagaaagaagagtatagatgttaacagatatttgcactgtaccagctcccagccacctgaaagagcttgatgggtcggcatcagtgagtcttggagagtacatgaagacccgttgctcacagggtgtgaactgggagttggaggcagtctggtgcaggtggaaaggcattgaactggggtggagtgaggaagcttaggttctgattctgatcgagccattgccatgctatatatattttaccttgtttagtcctaattaccatcctactaggtagggatggttattcttattttaggaatgaggaaaccggggcttagaaaggttaggaaacttttttaaattaaggttatacaggctaataagtggcagagcttcatttgaaccccagcctatataatactacccaaaagttactgcccagtttccctctctgagcctcattgaaaagaaaatgtttggatgatctctgacattccttccaggtcacaaattctacatttgatcttgttttttttgttttttttagtgatgtttggctttgaagatttagtccaccccctttcctccctcgttgttggtgaactgattgttacacaaccaacctcacctcattgttggtgaactgattgttggtgaactgattgttatatatggtgaactgattgttatatagattttcacacgtctgtctcccaggatagtgtgctaagaggaccattggagactgtagaagtttgtttcttttaggtgtaagccttgtttctcagggtactatgctttcactagcatcttaaataattaggtgacagagactattaacactttattttcacataacaccaagtaactaagaattgctattattttgccaattagcccatgcaatccttagctcataaaccaaactattatcttcagatacatattagtctcgattacccagagaaacagaaccaattggagacctatatctatatctatacctgtatctttctataactatacatgtagaaagggagggagggagggagggaacgatggagaaagaaactataaggaattggctcatgtggttatggaggctgagaagtcctagaatctgcagttggcaagctggagactcaggagagctgatgttgtagttctagtgcaactctgaaggtctgagaaccagtagagctgatagtgtaagttctagtctgaggagaggactgaagacagaagactaatgttccagctcaaagacaatgaatgaattggatgaggctcacccacattggggtgggcaatctgctttactcattctgccaattcaaatgttaatcttatctagaaacactctcacagacatactcagaacaatgttaaaccaactatccggataccacattgcccagccaagttgacaaataagttaaccattacaatatactagaactattatgtttttacacttcaagaggtgttgaagtgactcagtcgatctaaggggaaaaggtgatatgctattaaaaatataaacacagataaaaactgtatgttttagttagggtaagctaactgttataacaaatagactccaaaatttctactggcttaatcataaaagaagtttatttcttgcttgttacaaagtactgatcaagttaccaggtcagcagagtccctgctaaaagaggcctcttcatctttaatatgtagcttctgaagtcagcccaaatgttgtcttcatctcaaccagctgggaggagaaaagagcatggagaagtgccacatgggaggattttatgagctaggccaggaatggcccaagtcttttctgtcacattcttttgcatggaactcagtcacatggctgcacctaactgtttgggggcggctgaaaaatgtagtccctggctgggcagcccatatcccagcatgtccactgtaccctgtataaagaatcagaagatctgaattctggaattggctttcctattaactggctggtgatcttttcttgtctgtaaaatgtaaaagcttgttgatatcccaaataccttcttgctctagaattctatgtctctgttttgctctttaaaagaaaatgttctgtgtgaagacagctagttctttgcctggatgcagtgaaggtcctggttcatgcagcaaactttgtctcatgtaggacttaatactggcaaatcagggagccaagtctgggggctcttttgatcctgtactggataaattattattcactgggcatagtaagcattgattcatgggtggcagtttactgtattttaggggtcttctaagtggtgtgtgcccctggcccacatgaagatttttccaaagggttaggtgttacagccagcatttttagaggatcagttatctttaatttttatatgtacctactcctaaactgatcaaagaacatctgcaatgaaagaattttgttagttcttctttcccacctctttcacagttgcccttctctacctttacaaatgaaagtctactgcttactcagcctgcatcttgcatagttcattgttccaagtgtagaaacctctagggcaccaaagtgattttttaaaatatgtgtcacttatattcaagatattaaacatactttctccatctggcacattaaagagtatatttataataaaagttttgctttttatgtttagtaataatttatgaaaagtatatgtatttatgttgttttgatcaattatgtaccactcataattgagaatacagctcagtaaaacattatttaacttatagcctgatagtgacagaaacttaaaaaatattttttatttatatttggtacttttaaatttaaaactattttgccctaagagaaaattctatagcaaaggtgaaacagaaatacaatttcaagaagctaaaggagtgactgtgtgtactcgggtgatgattgagatagattccgcccttgtggctgataaactagtggaggaggcataaacaagtaaattagcaaaagtgcaagataattttagaccatgataaatgctatgaagaaggtaagcaggagggtggtcaaagaaagcctctcagaggaagtggcatttggtatgagcacagaagaagtcttctctcctcttgagcaaatacatcctctcaggttggggcatggatatggtggaagggaagcagagcttatttctgttaaaaagagcttgttcatggctgggtgcggtggctcacgcctgtaattccagcactttgggaggctgagacaggtggatcacgaggtcaggagatggagaccatcctggctaacacggtgaaaccctatctctactaaaaatacaaaaaatcagctgggcatggtggcacacgtctgtagtcccagctacttgggaggctgaggcaggagaatcgcttgaacctggaaggtgaaggttgctagtgccactctactccatcctgggcgacagagggagacttggtctcaaaaaaaaaaaaaaaagagagagagagagagcttgtttatgtatattttaaatggatgctgatggagatcaaattgctttggtatttatattcccactggatacatttaaaggaatgacataagtttgtgatatttaaactatttcaatagtcaccatacactagaaattatatcatttgcaaatatttaaacttacaatgaaaactttttcatatcaacctaaaatgaacaagtggtaaatagtttattaaaatgtttttggggatacatgagcaaaggactttcaaaaccactggcatagtagcttagaatatgggctttgagtttaggctgcttaagttggaatcctggatccactactactggtcgtgtgatgaagagtcagttctgtgagcaacagcatctgaatctgtaaaacagaactgtaatcccagcactttgggaggctgaggtgggtggatcacaaggtcaggagttcgagaccagcctgaccaacatggtgaaacccccgtctctactaaaaaaaaaactacccgggcatggtggcacattactgtaatcccagctacacaggaggctgaggcaggagaatcgcttgaacctgggaggtggaggttgcagtgagccgagatcttgccacttcactccagcctgggcaacagagtgagactctgtctaaaaaaaacaaaacaaaacaaaaaaacgaaaacgaacaaacacaaaaagcacctaagaaggaggaaatttgaagtttacatgagataatgcatgtcaagtgctaatctcacaataagggctgaacaatgttttctatattatcaacattataactttgctctcaactgtatagtgctgattgaactctattatctttcatatggttgcagagcaggctgaaaggtaaattgtgaaatctagccctttgctgaactggagtagcacttaggggcaaactacactattcatttcattctttcctacttgctttatgtgttattgattgatattcattcattcattgatagtccaagttgagtatgttttgagacacttactgagcagtcctgcaccttgactacagtgtggtctcttctcctccttgtagttcattgaagtcattccaaggaaattacagattttccttctctccctgtgcacgtgtacctctagagtgtagggagatgcaatcttgagaagagtacttggtttctccctgaggacaagctgatggcactggctctgtctcctgatgtccttgctgtggcttcctcctttgttctgctaaggccttagggcctttgtgtgacacagctggggattactaggaagaagtaaatatttgcaaagggtgttctgtagaatgttaaaaaaaaatagaaaaaaattaaaggccaggtgcagtggctcctgcctacaatcccagcactttgggaggccgaggcagatggatcacctgaggtcaggagtttgagaccagcctggccaacatgggtgaaaccccgtccctataaaaatacaaaaattagctgggcatggtggcgcatgcctgtaattccagctactcagggggctgaggcaggagaattgcttgaaccctggaggcagaggttgcagtgagccgggattgtgccactgcactccagcctaggcaacaaagtgagactccatctcaaaaaaaatgaaaaaaaaattgcaaaggaaaggggaccttgggagcaagttaacatggtctggtgaggtgaagagaaaagctgaatgaaggtggcattagaaggagagaggatttaaaattattgagggaagtatgattaaagaaactggaagatgaaggtaaaggatggtagaaaaattagcgttaaaaaaatagagtctgccaaaagcaaaagtaaggattcattaagatacatagcagaaggaaaattgtgaaatgaagtaaaggaaaaatacaactgatgaatcaccagggagttatagcaaggccttaaaaatcattaatggaaagtttaatgccaaaatattagagtaaaaagatagcttgaaagtacacagcttgtctgtgcctggctcctaaaaaacaccacagaacggccaatcctttgcctctggcacccacacagcatgcatgccctgaagtgaaatctttcataccgtccctatactccctcttcacacacaagctttgttaccattctttttatttcattcccactggtccaaaactgtatatgcaacctataagaactgacccagcggtgctgccaatgtgcaaagacctgcatccatgggctgcctacttctggcaaaggatcagtttgcttaagttgtccacttcccttgtcatactactgacttgtcaatattacaagtgtttattgacagtcttccttctttcagctgaaggcctttcaagttagggactgtggctcttttgcttattgtagtagtcctggaacctaatgtgtggagaatggattagatggggagagagtaggagtttacctactaccagggtaagaagtagttttggtgagttaagggtgacttggtttagggagttggaagctgcggcataggaaaatgtctgtttgagacttttaggagatatgttttgatgaaagaaaaggacttggtaattgattggatgtgggtactgagcaagggaaagtgtcaaggatgacttggagagagctctgattgggtggtggtataattgagtataacagagaacactggacgaggatcaagtttgcgagggaaataaaaaacccctgagatatcctggtggaaatgttgagttggcagttggatgtatggagctgaaagtgatgtcctttcactcccatttctctagacttgacttacttcctgatcccagatctctgtttccaaccaattattgaacatattatctggaaaaaccacaggctgctcattctcagcatgactaaaactcacctaatcatattcctctgtgtagcctggtttccttcttaaaatcttaatcattcagtgggaattttattttcctgtttcctctgtctctacctgacctgcaaatccattccacccttgtcatgtaagtctttttgatctatacgtctaactcttattttcatttccactgccattgttccactcccactgcctgatgctcattttacccctgcctattataatagcttccaaatttgtctccctgaaactgtgatttcttaacttcaagcacacgtccttattcacactgggtgcaatctttcaaaggctcaatagtaagtatgagttttaaccccacagtatgttagaaaacgcctttccccttctgtcctctgcatacctcaccaatcttgtcttctttgctcaaccaatctgtaatcagatctttggataacctgctattatacaaatgcgcactctaatttaggcacccttgtgcctgttgtttcctctcttcaggatgaagtttcttcacctttggccaccttggatactgttttcttagcttggaatgtgttttcctcacttcattcaaaggaccagcttaaacatcacctcctcatagagacctacactgtgcctgtgtcttggtttagctcccttgcctacttttactttaagacacttatcacaatgatgatggtattatttatgtgatcatttatgtaatgactatctctgtcactagattaaagacctcatagggtcagggtctgtgactatttcattcaccattgtgattcagcatctgtggattgcagttgcaagcatggatagggatgaaattagtcaaagagaaaatttggagtgaggaaagaaagtcaagacagaacactagggaataccaatatttatggagctggacatgaaggcagatcccacagagaagtctgtggaggagcactggagaaggtaagagaacagggcagaacagtgtcatggaagtcaatgatggagaggattccaagaagaaggagagaacacttaatagtctgggaccaaaaaaaaaaaaaaagataaatgaacttgaaggcatagcaatagaacctatccaaaatgaagcttacacacagagataaaaaagaccaagaaaaataagagagacctggaggcaataacatgttgactgacatatgtaaatgggaggcttcagaagagaagagagtaaaagagaacagagataatatttaaagaaataatgaccaaacatctttcatattttatgaaaggtataaactcacagagctaagaaactcggaacatgaagcaagatacctactagggaaaccacaccaagaacttcattatcaaattacagcaagttactaattctgacaaaaatcttaaaattagagaaaaaagggcacattccatacagggaacaacataaaaataattacaacagagttttcagaaactatgcatgtcagaagacaatggagtaacatctttaaaatgctggaacaaattttgtcaatctaaaattctagacccagagaaaacacctttcaaacatgaaacatgtctttccttagacaaagaaaagttgtgagagttggccagcacacctgcagtacaaggcttgttaaaggaagttcttcaggcagaaggaaaatgatacctgatgataatgtggatctacacaaaagaataaagagctctgaaagtgataaatatgtgggtaaactaatttcatcatttaaaaaattttaaaaaggcaacagtagactgcttaaaacaacaaacagcagcaacaatatattgggggaattcatgacatgagaaagtaaaatacatgacaacaatagcacaaagggcattgggggggaaatggaagcacaccaatgcaaaattcttgtattttatgtaaaatattgtaatgtttttccaaggtagacaaataagataaagatgcgtattaaaagccctagatgaatcattaaaaaataaagtatagccaataaaccaatagtattgagaaaatggaatttaaaaatactcagctagcaggaggcagagcaagatggctgaatagaagccttcaaccaattgtcctccttgcaggaacaccaaatttaacaactatctacccacataaaaaaacaccttcgtaaggactgaaaatcagttgagtgaccactgtacctggttttaacttcatgtcactgaaagaggcactgaagaggataggaaaaacagtcttgatttgtcagtgccatccctctctggttccctggcagtggccgcatagcaaagagaatctgtgctcttgcgggagggagagtacagtgactgtgggaccttgcattggaactcagtgctgctctgtcacagtggaaacaatactgggcagaactcagccagtgcacgtggaggaagcatttagaccagccctagccagcagggctttatccatcctagcagtgggaacttgagttctggcaagcctccccaccacaggctaaagtgctctggggttctaaataaacttgaaaggcaatctaggccataaggactgcaactcctaggcaatcctagtgctgggctcagagccagtggattttgagggcatgcaacctagagagacaccagctggaatggccaagagagtgcttatgccactccttccccaaacccacgcagtgcagctcacagctccaaaaaagactccttctttctgcttgaagaaaggagagggaagagtaaagaggactttgtcttgcaacttggataccagctcagtcacagtaggatagggcattaggcagagttatgaagcccctatcccaggccctagctcccagataacattactagacacaccctgggccagaagcaaactcattgccttgaagggaagagcccagtcctggcaagattcatcatttgctagcaaaagagctcttgaacccaaaataatcagcagtggtaggtgggtagtacatgccatgggtcttgggtgagactctgagatgtgctggcttcaggtgtgacacagcacattcccagctgtggtggctatgaggagagactgtttctgcttgagaaaagcagagggaagagtaaaggagacttcatcttgcagcttaggtaccagctcagccacagcagggtagagcactaagtgggctcttggggtccccagttccaagccctggctcttggacagcatttctggacgtcccctaggccagaggggagcccacttccctgacatatgagtcctaagcctggcaacattcaccacaagctgactggagatcccttgggccttaagtgaacatcagcagtagcctggcagtactcctcacaggcctgtagcagtggtcaccatgaagagagactcctctgcttgtggaagggggagggaggagtatgagggactttatattgtagtttgggtgtcagcacagcagcagtagaatagagcaccagggagattcctaagatttccaactctaggccctggctcctggatggtatctctggacctgcctggggcctggggggagcttgccatccttaagcgaaggacatgagcatggctgttttcaccacctgctaattatagaaccttagggccttgagtgaacacaggcagtaggcagatagtggttatagcaggctttgagcgaggcccagagctctgctggcttcaggtctaacctagcacagtcccagtggtagtggccacaggggtggttgtgtcatctctcccccagctctaggcaccacaacacacacacacacacacggagggaagaggaggaggaggagagagaaagaaacggactctgtttctttgggagaaagtaagggaagagaataagagtctctacctggtaatctggagaattcttccaaatcttatccaagatcatcaaggcggtacctctataagtctgcaagagccacagtgttactgagctcgaggtgtccccctaatgcagatacagctgcagtgaccaaaaactcagatgacaatatccaagttcctttgaatacctggtaagctttcccaggaaggatggtgtattagtctgttctcacactgctataaagaactgcccaagactcagtaatttataaaggaaagaggtttaattgacggttctgcatgtcttgggaggcctcaggaaacttacaatcatggcagaaggggaggcaaatgcatccttcacatgatggcaggaagaattgctgagccaaggctgaacttttaaaaacccaattatgtgtagtctataaaaatttatttaaataaaaatacacaaaagagaaaagctgggaaaagataaagctgttttagttatattaatagccaaaaaaaataagaactattaccagggataaagaggaatatttcacaatgatggagtcaatgaatcaataaggcataacattcctaaatgtgtattcaccttataactaaacctcaaaattcattaagcacttgacagatctggaaagataaaaagataaatctacaattataattgcaaatttcaccactccttttagtaattaatagaacaagtcaacaaatagaaatatggaagaattaaactaatcatcaacttgaactaattgacatttttaagaacatgtcacttaacaaatgcaaaatatacattcttttctagtgcagtggagcatttaccaagatagaccacatgcttagccattaaacaagtctccagaaatttaaaaggattgatatgatatagagtatgttttctgactacaagggaataaattagaaataagcaatagaaagatacatagaaaatctcaaaatacttggaaattaaatagcatacattgaagtaattaatggtttaaagatgaaataaaaaggaaagtagaaaatatttgggggtaaatgaaaagaagacacacatatcaaaatttgtgaaatgcagcctaaagggaaatttataggcttaaaatcttaattagaaaagaagaaaactctataagcaacaggccaagcttccatcataagctagaaatataagagcaaattaaaccccaaactagtaggaaacaaatagtaaagaagagaaataaatgaaatagagaaacagtgaagaacaatgaaatcaaaatctgattctttgaaagatcagtataatagataaactgctggctatattgatcaaaaaaacaaaaaggatgacaaatattaccaatatagataatgaaaaaggggacatctctaagattctttatatactaaatgtctataattaagggaatattataaaaaaacttgatgttaataaattaaacaaccttgatgaaatggacaaattccttgaaagacacaatcaaaactaactcaagaatcaacagaaaacctgaatatcaattaagcacattaatttgtaattagaaatctttccataaaaaaatgtataggcccagatttattacctggtcaattctattaccgggtcagtttattacctagtcaattctatcagacattcaaggtagaaatataagtgacaatcccttatccaaaacgcttgggaccagaaggactttagatttttgattttggaatgcttccattatacttaccagtggagcatcccaaatccaaaaatttgaagtctgaaatgctccaatgagcatgttctgtgagcaccatgttgttactcaaaaagttttagattttgaagcatttcctattgctgatttttggatttggaatgttcaacctataccactatatgaatttgttttgaaaatataggagaaatacttttattttatatggtcagcacttttctgatctcaaaaccagaccaaaaatattgcaaataaagacaactacagaataaaattacttatgaacatggaccaacaatcttcaacaaaagatgtgcaaactgaaaatgaaatatataaaaaacgtaatacatgataatcaaataatgtttatcctaggaatacaaggttgcttaacattacaaaattaatgaatgtagttcatcttattgtcataatgggacaaaaaccatatcatcatttcaataaatgcagaaaagccacttgataaaattaacatccattacatattatcatattgtaccataatcatcttccagtaaactaagaatagaaaggaacctcctcaatctcataaaaggctgatgatgacacatttctatgaatatactaaaaactaccaaattttacactttaagtgtttgaattttatggtatgtgaattattaaactgttttttttaaaaaacctgttgctgacttagtatttaacctgaatgcttttgccctaagatcaagtagacaaggatggtcactctctccacttttcaacattctattgaagactcttgccagtgcagtaagacgaggaagaaaaataagaggcacataggttagagagctacaagtaaaactgtctttattcacagatgacatgatcaagcatgcagcaaacagcaaatcttcatgaatctaccaaaaactagtagaactagtaagtgattttagtaagatttcaggatgcaaaattaattgcatttctatatattagcaataaacagatggaaattttaaaaaggacaatattatttgcaatagcatctcaaagcatgaaatacgtgagtatgatgattaattttgtgtattagcttgactgggctatagggtgcccaggtgtttggttaaacattacttttgggtatgtctatgaaagtatttctagatgagattaacatttgaatgggtagactgagtaaaacaggttgccttccccagtgtatatgggcctcatctaatccaattcattgggagcctgaatagaacaaaaagcagggaaagggagaatttcctctctctgtttttaagctgggacattggtctcctgcagtcagactggaacttataccattggctcctaggtctttggacttgaactggaacgtatatcatcagttctactgattctcaagcctttggacttggagtagaatttacattgttggttcttctggttcttaggtgtaaggacttgaactggaagttcaccatcagctctcctgtgtttccagcttgcagatggcagatggtctgacttctcagcctccataattacattagccaattccatacatatatagccaatttatatacatatatagttggttctgctcctctggagaaccctgaccactccaaaggggttaaattaaataaagtatatgttaaaacccctaccctgaaaactggaaacatttctatgtgaaatttaagaatatgtaaatgtattgatttatgatgtttatagattggaagacctgaaattgtttgtgatttcagttcctcgaattgatttatagatttgatgacattccaataaaaatccagattttcttatagaaatgttcaagccatttctaaaacctaaatgcttagaataaccaaaacaattttgagaaagaacaaagttagaacacttaaacttactggctttaacacttactgtaaagatacagcaatcaagttggtgtgttattggcatagttttgacacatagatcaattaaacacaatcgagaacccagaaatagacgagcatgtgtatggccaattgatttctgacaaagatgccaaggtaattcaatatggaaaggaataccttttcaacaaatggtcttgaacaacttgttatccacatttaaataaattaacatcaacccttactttatggtacacaactggataatcttaaatgtaaatgctaaaactatacaacttctggaagaaactttataaccttcacgtaggcaaagatttcttaaacaggacacaaaatagcataaacataaaaagtataaaaaatttataaattgggctacatcaaaatttaaaacccgtttataagaaaatgcaaatgcaaaggtagacctcagacagataaaatatatatgtgtgtgtgtgtgtgtgtatactattttatattataaggactgatatctagaatatataaagaagtctttcaactcactgatagaaccaattataaagtcaataaaatggacacatttgaacaaactttaccaaagaagatacacagatagccaatatatccatgactagatgctcaatatcattcatcgttagggaaatgaaaattacaaccacaatgtgatatcactacacatccgttagaacattagagtggctaaaattaaaaggaccccaaatactaactgttgatgaggatatgaaaccactgagattttcctgcatacaccgcttatgggaatataaaattgtacaaccactttggaaaacagttttggcagtttcttataaagttaaacatagatttaccataagattcagcaattctactcttaggtgtttatccaagagaaatgaaagcatgtgtccacaaaaagagttgtacacaagtgttctttcactttatttaaagtaacccaaactggaaacaacacaaatgtccatcagcaggtgaatgtataaataaaatgtttaacaatggaatactacttagtactgaaaaggacaaactatttaaacatgtaccaacatagatgaatctcaaaataaatgtggtaagtgaaagaagaccgaaaaaaaagtaggtattgtatgatattcaatataaacctctagaaaagaaaaacttaacatatatttacagaaagcaggttcatggttgcccggggccagtgatagggtgagatcggctgggaaggggcttaagagaatgatcttttgaagtaatggaaatgttctaatcttgactttagcagtggtaacatgggtgtatactatttgtcaaaagtcatagaatatacccttaacatgagatatgtaaactatccctcattaaaattgtgcttgtatgtagtagttgctgtttttgaggggcaacatcttggagtcagtaaagggaaacattataaaggtgttgacaatttctccatagtataaagcctgttccatattgggcactgtgtcaggcattcctgtgactcttggctgtaatacaaagcaacttcccacttaaatactggctaagaccaagagccagggttccctcctagaagtcccaagctggacccagaggaaggtgctaacatggtgtgtttcggccacaggtctctttcagaggaccacaaaactcactacctcccctctctgagataatggagtgagtgtgttaggttggctcagtggctcagactaaagcgtcagggactcttatatttaaaattgatgtcactgctaatgtactgcttgaatgtatctaagcccctgcctttctatttcaatttcctctgtggttacaggaaaccaactatgacagtccattatacatggaaggctagtgttgccagattttaatttggagagtacagaacataattttgactaattggtccagtaggaactagagtagaatctaaacaactctggaggtctgtggcaatgaaacagggaaggagggagagatttaatcaaccttcacccaggcaggctgttgacagatttctaggctgacttaatcaatgtacttatttctcaggtaagacctcaaaactatttggatctaatttcactatacttcatcctgttcatgatattatgctttcaaagtaacaagcctcgaattccttttaagggcacacaaaagagtaaaacacactttctttttgtcccgtctgaagtggacaaatggagtgggtgcatagaagttgtaactctgagtccacttaagttttgcgagtgtataagtcatttttcagtacacaatgaagttaacaattaatatctttgtggtatccagaaacaatgtcaaccaaaattggagcaatgaacctgagaattgaattcacttgagctataaatcataaacccatcaatctctagagcagaagcaaaagtgaagtcattgaatattataatagattccatatgttgttttaaagaaggcttaaaaataactagacttacaggttaccatatttctgtggcaaaaatttacatatgtgaataagaagtgaaataactgactgtccaatttttgcttctgttttctgccacttctttttagtagtggaataattatttagctcttgaagggcagggcagaggaagtgtgataggcactagagaatgtggaggagctgataaaatagaatatgaagggaggtagaagaaactgactctcagctttggtagaaaaggtagcacagataaggaagcacaatttcagataaccctcttggcctttcccctgctaccttattacagagagttagtgtttctccttaagcattaaagttacaaagccaaatagtaacatggccacaattctgtgaaaattttgaaaggccatgacaaaatgaaaatgaaagctttgttctaagtcagacagatctgttttcaaatttggaccctgctctgtgaccttgggcaattcacttaatttctctgagcttcagtttcatctggatggggaattaatacttacctcaaagagctctcagtgtaatacacttgtgtatttctctcttctaacacctatcctgtcagtttgaaatataatctatcattttgaaatgtatctctttcttctcatatgattgtagacttcccaggaattgagattaagaactcccagctcaagggccaattagtggagaacacaggcttaacttatctttgtttcgccctgccccatacacacctcgcacaataattaggctatagctacgtaaaactttagggacttcttccttcctgtgacagcatggtgctaggtgagatttaaggaaactacacgtcatgtccctgcaaatttgccatcttgttatagtcagtcagattggcccactaaccctccagctagaaagtcaggaatgctaaatcttatatttgcatgattgctgttgtgctaaggtgtcagaacgcaagatacaatcttagttcaagtttacactttggtttatgggaaatagcaaggtcaatctgtggcaatgaaaaaaatggaaagtcctgtaaaagtttaaggagggaagaataaaaggaagagaaaagaaactgtaacccagttggaatgaaatggtaacatggaatgaaatgatcctctttccccccagacagatgttggcatggatttcatatggactctgaaactaaagccgacacccaaccgagtgctcaagccctacattccatccacccctcatttgttagtatcaaaattgaggcatttcacaaacttggctatcgaatactgtatgtgtgtggaaaagggccagataaaatgggccaattagaacacagccacatctgtcaaaactctaacccttaaccttagtgaaaatataatctaggatcaaacacagaagccccgcagatgtacacaagtcatttaatgcagcccttggaaagactgtgatgaacagctggtgctattgtgaaggcctgatgagaaagccaggcttggttttgctacgaatatttgcaattttaaagaaaaaaaataggttctaattgagtaaccattgaatgtatcccagtaaggtccttcccataggctgagttgaaaatactctgactccgttgctatgcaaagcagtttctaaacatgttttgaaaatccgtttgaaatttgagagtagaatttggttctcaaaggcttcatttaggcttaaaaccttttggttcactctaaaataatgcgagggtttcatccttaatggactatcgaggttaaattcaacagctgcttctcctctgatatatatttatgaatgcaggatgcattctatatggtacagtacaccctcacagagctctgagtaagaggaaaaaaacatggaaacaaatttttttttaatgttggagtgtccttacggggtttgctaaaggacaaatggggctctcattaaaaatagggattgtatcttcttgagtatacatggatcgtgaccaacacaacagtttttactgaatttactgataaaaatgtcactatgttatgtcaagctcaagtctttgggagggtttttcaggattctgtaagatatggctttgactttgtattcgcttttgggcaccaggtcatcagggaaaagtcacaagatctatgcaaaaggcagcgtcaggaagcagcatctctagtggtttccccttggtttcattgtccctgtgttcctgtgttcatctgggttattgagtctttgatcccacatgggaaaggtttgccatgttgagccagtagtagtataactcattctaactaaggcacatagcttctgccctctcccctgctggatgagtattggaccaattcctttgtccttagcaccacttacaaggatttatttccattccagaggatttattcccattcagagaaggaacaacatagttagataggaataaaaatgctactctgtgtataaagcttcttgcacctagctaatctagcaaactggtgttttggtcttcaacactaactagatcattattatgtgacactaattaaagggtcttctgtaatgggataaggtgttatctgatcaaatgaaggaggaatgatatttggcagtatatggtatatgtgaaaatcatggtgttcttgctacttagagactgtgagaagggataaggattggcttagagccagctcactctacatgctctcccagaagtgttttcttgaaagagtttttccccattgggaccttccattttcctctggcttagtaaagtgactgtaattaaatagattcaatttctgtttatggtgaagtaaaagattgagaacagattgctctttaacctgaaatgtggaagggctagtcgattcggaagctagttaaaatgattttgtgtattaactggtaaactcaacagattttttcccctgtgaatctaacatttctagatctttgcattcctcccgtgagaagtccacctctgaatcctttcgagagctcagattcctaggaactcagatttttgaacatctacatgatgttattttgtaagtggaacactgactattaaaggatagcagtggagtggagtggtgagggcacagctctgggtcaggataactggagagaaaccctaaggcttattccataatctctcttgatttgagcttctgaggataaactgaggcttgtaacatgctagcccagtatctggtgtagtaaatattgaatgcactgtggtggagagggttgtgttgtcaatgttgctgttgttattgttgagacctaaaggattgctatgatctaaatcagcttaatttccttcaacttgataaaaattagcctgtgactattgaactggatgatgctctcctaatggtttttgcattttgccttcattcagccagttaaagctggtgtttacagaattgtgaaacatttgagcctgggacagtcatgtgatttacagttttgtcttgtttcatgctttccagcaacataattactgaactttttatcgtaataaaaatataggcaataaaaaaggcagtcccctggaattccctctatctctcttagaatgctaaaggatatttttttgtgatctcagctctgttctgttaagtatcctctcccttccccacgtctgtctttgcagatttgtgaccagacggctgcactgaatggagactaggaagggagcccaactgttttccttgtgttggctctctgtgccgagcagggattgttgagcaaagcagggattgctgagcagcgtttctccagggagggtcacagggtagtacaaacccactctggatttttcttttttttttaattattaaaaactttggccaaatactatcagtaagggggagaaagtatgtggtttgaagaccagttggaccagtcttttaaaatatcaactggaataaagcaagaatgccttacacttctttaattttctacatttaacaggagacagttgctcccagagtcacttctaactccacagacagtattgtgcaaccttgctcagcatttggagacactatataattaaaattcctttgaaaatggttgcccaatgattgacatttattccaaaatacattatcatgttgaatgcttaattccttcttccagtacattttctttaataaaaaagtaaaaatctattttttaaaagggtgatggagttttgtaaaaaattgaagcagtgtaacaaacttatgtctaatcttgctcttaaagagctggcaggctagcaggggagaccagagtaagttatggaaagcaaaaaaagcaatactcaggatataactgagttgccttatatagatagacttgaaatgctgctgagattccaaagaggaagagataataggaatctgttgctctcttacctcctagtacattgactcatacctccacttcaaacacaagcaacatttagtattactacgaaattatctaatgggcttcctttctcagggcagtaggaatctgtctctctgctgtggctttctggagtccttcccttctgatgtctgtctgtgccccagtttccattttcatatggtcatctttgattctggatagctgcttctctctgtgttctcagaagaaatagactagtgagatcactgtcatgccccctccacaattaggaggctgtatcttgagaccttcttggatcccacaatttgtagatatcacaatagcaatcatggttagagaagtctaccaccaaaccaggagttagatgctaaggatgggtgagcatgtccaaatagcagctttaaaaagcctcagcacacttacaatagactacatgtcagagttttgggttatctctgaatagtcaaaaccccgatattatatacatgtatgtaaagaggctattttaatatcatactgtttgtttgacttttgagtagtgaatgcataatatgggaataagtacaatacgtgagtgaaacaccgaaatcacctttcactgttttgtttagtagtttggagccttcagttcttctggaaaaataattcaatgcacattagttttgctttctacatttgagggaggtgaatgctttacttttgtaactgtaagaggtctcagcagtcttgtagcctattcatattaaagataaggacactgaggccaagaaaggtgaaatggcttgcttaatggttacacagagaattaaccgtagcttcatgattttaactcaggtcttgtgactagaatttcagtgcactttgcattaggcaattctgaacctttgagtaaaactaaaatgcaaagactgctcttgatagcattctaggtggaagagttgaagatagtaggatataaagataaacaaacctatcttatctggacaggacctcagctcattaggaagaggaatgaggaagagagaatgtaggaggaaagaaatggcagaaagacaaataatcatgggaagggactggaacagggtaaatgccagacattttcaagattagaagaaatctgagttgagtttgaaaaattgaaagatttcttcaggtagaagcaaaaggaaaataagcagaaatattatcacatataatggagtctgcagaggaagaagaaaagcatgaccctaatagataaagataagaagcaccaaatcatttcaataagtttctgaattttaaacactttcttttccttccaaacacatttaaagaggaggaggaggagaaaaaaataacgatttgtgagggatgtctcatatgctatttattataagaaggaaagtaaaattcaataaattacaaaatgatgtatcaaacaaagttcagcatggaggttaataaaataaatacagacttgagtggagttgtgtcctagcacttacttttaaagccgtgtttcaaaaaaagggcatccatggaagtgatggataatttttatctgatagcaagaacagacactaataatggcaagttattgtgttcttagattgttattttaatacttaacgttttcaagattagcctctgagaagctgctcatttacttttggtgcataatgatcacttagggtatgaagccatcagctgcgccctttgttatgaccatggaaaatgttatgacctcctgtcaatgattattttggaaggaatagaagaaataagttatgattacatattatagatattataagcatagtgttagtaaatattttaaaaagaagactaggcacagtggctcatgcctgtaatcttagtactttgggagactgaggcaggaggatcacttgagcccaggtgagaccagcctgggcaacatagtgagattctatctctacaaaaaaaaaaaaaaaaatctttccatggctttctcatctgcagattgtttctcagtgtcaagcaagcacatctttcttccatcccacctgtcttccctgttttaattttatttctgtgcttcataaggttgaggcagtatgcaatcacaatccttttacaattacaaaaaaattcccaaacaattttcttttttaatttttgagaaaaattttgcttttatgctctctgatcagatttgcctttatatacatacaggttccttttttcaccccactcccaacttaaggctgattttaccatccagttgtttaaacaaaattctgttttgggtatcaggtgttttaaattaaaaattcttcaaaattgatttccaaaggagtccgtaaggcttacgatattttagaccaattcttaactagaacagaaaattttgccttttaggtttacagtgatttcatattatctgatgattctgttgaaggggcccattatttatggtatttgcctggaggttgtcttgtaagccttgactatgtgttttaagaaagaaggcaggctgagtgcggtggctcatgcctgtaatttcagcactttgggaggccgaggcaggcagatcacctgaggtcaggagttccagaccagcctggccaacatggcgaaaccccgtctctactaaaaaatacaaaaattagctggaggtggtggcagatgcctgtaatcccagctactcgggaggctgaggcatgagaatcgcttgaaccctggaggcagaggttgcagtaagctgagatcacgccactgcattccagcctgggcgacagagcaagactccgtctaaaaaaaaaaagaaagaaaaagaaagaagtcagcagttcaactataagatgcacagtatatcagaggtagtggaaagtctacatatgcctcctattttaattttaacaaaaaaatgactctgtcacatagacttctagctctttttagcggaataggtaggaaacctataatgcatgaattgtttaaagaaagtatcgaggctgggtgagatggctcatgcctgtaatcccagcactgtgggaggctgaggcaggtggataatttgaggccaagagttcaagaccagcctggccaacatggtaaaatctcgtctctgttaaaaatacaaaaattagctgggcgtggtggcaggcatctgtaatcccagttactcgggaagctgaggcaggagaattgcatgaacccgggaggcagaggttgcagtgagccaagactgcaccactgcactccagcctgggtgatagcacgagaccctgtctcaaaagaaaaaaagaaaagaataaagagagtatggaataaaatgctagatttgaagaggaaaaggacaggttggtagcaggactggctatataatttgtggggctcagtgcaaaatgaaaatagaagtccccttgttcaaaaattaagaagtttaaggtagcaacagcaaagcattaaaccaagcatgaggctcttctgagcatggggccctgtgtgacttcataggtcacacactcataaagctcaccctggtcagaagttgagatgtcagtaaaaaggaaaaggaatgatccattccctgtgatgttttcctacctctatgccatccttacctatgtactcatcaggtgtgaccatctctcaagggggcaccattgtgccagtgagctgagacacagacactggctctagtctatggaggaaggagcatgagaaggaggttgcattctaccagcggcgggagagtaggatggagctgaaggctttctgaactgatctaggagagagagcatgaacttgggaactctgcaactttctagcagtgtagtaaagttatttaacctctctgaatcttattttttcattgccgtaaaatggtgatatctacctctcagggttactgtgtggattacagataatgtggaaaatgcctagcactgtggctggtatgcagtggaagctcaagatatattgtacatatggtcatttttgtaagtgcggagatacactgaggatgagtgaaaaagacttcaagtctcagatagggtggaggatctcagaatgcttgaagagccttgtaagaactggctgcctctcttgagtccctccttagttcctgagtgctttggaatcgtttaaaactcacaattgcatcttcttcccaaacagggtgaggagcaatctgtgggaagtcagtgcacagtagagttcagtcttccaacgctgaaaatttgccaactttcacccacactgtggagatgagaaagcagctgtgggcagacagtagagtaagctgtggggtctctggaacatgttacgcttacggatgttccattgttcccatgagattttgtactttgtctgttttatccaggtttgtttccataatatacgaaggagacagccaaaaccattttatgtagttttcctactttgttttgatttatttgttattatttacagtattatctccaataacaacaatggaatttcctttcctactaatctggcctgtttccattttgcctgtttattttaatttcctttttttggactgaaatctctacatgactctgatttgtttatttccttgtgtgtatgtgtcagcatcatttattagtgtgtccactcagaggaactttgttcattaattatgtaggttttgtttcctggttcctaatgggagggtattaagtgctctatgtttctaagtacttcacgatggttttggttatcagtttcttcatcactgctctctgcaagtagatgggcttactctccatggcttacagatggagcatgggaagccccagagcagagaagtaactcctctgcagatgatgattttcttaaatccgctgacccgtcacgcctgccactcgtatagatttcaatttccacttacttttatttgggtagtgggttaagtgagcataagacctgtgttttgcagacgtgattccttgaagacatttccatgaaaaccagcctgttgttaacgaatgagcaatatcgtcttgcattataagctgcttggggggtgtgtgatgaatgttagacttatcccttttttgtgaagaacttacagcccactaagtcaataaaaaagttaaaaggaagaggtaacctgacttttacatctgttacttgaatatataagatctgctgcctccttttcaatggattgtcatgatttactaaatgattgaattaatgattcataaaacatttatttagtacttactctgtgtgtgatactatctctagtctcaagatgcttataagactagaaggcgaaaatagaattgaaagcaaataaatataataaaatgttacaggtgacatgatagaagtttgtctagagtacatagaataacaaaggagggaggcctgtattctcttgggatggggattggagagaaggtgtcacaaacaaaggctataggcaccagatgtatctggggtccatagatactttcaaatggctgaaacagtggctgaggaggcagcagtgcatgcatgaggtgggagaagggaggtggagaaagccagacacaaagatccttggatgctgtgtgaaggaatttgggttttattctttaggaaaagttttaggtagttggaacatcagtaacagttttgctttttagaaaaattacaccaagaatagactcaaggagacttgaatggaggcaaggagactcttctgataatatggggctgagccaggcaagatatgatgagattctgagcaagccagtggtggatggaaagatgtcaaagaagtagaccttgtaaaattggtatcaatttttaaataatatcttacagtaactgttagcgaaaccaaggcccaagaaagtgcatagccagtgaatatcaaagggatcttcctctgccttcattgcagtttagaaacacaattattgtggcatttcagacactacgttgtaatacatcatattgttaatacttgtttacaatctttctgtcctgaggctctaagcttcttaaggttaacagccaaactactgaattatttgtgtatgcctagcatggagcctcatatacacaagtgcataatagatgtttgaagagtaaaactcttgacatcatagccagtgcttcttccacatggagcacttggcatgaaaatatgaaaacatcactcaggtttgcctgacagccacccatttccatcactccccttgagagcaccaaagccaagtgatgagcaggtataacaggcagatgatggcttgcactttgctttaaaatttgtatcagtttgccattatcagaatgcattcttacctcccaaagcctgcattaaaataccaataatgaatatttagaatataaaagtggccataaaagttgatgcctattatgatactgtctttaatggtctcactagtcagaagtcaagcatgataatttgcttcgatgtctcttttaatgttacccattgttttaacctggatcacactttattcttccacacagatccgtaatgcctcctgcctgcctctttcaagatggaggtgaaacctgtgggagaacctactcaagaggtgtctaaattcaaactttccaccaaggtagaaagcacgggacactggctggtggaagatcatgttcgaatatgggaagttttaaagacagaggaggtaagatgactctaaatgacacagttggtgaaatgttggatttgtttatacctgagactataattcttcgtgtagccagcaccacaggccagcttggcaaatctttattcaggggctgtaggcacagccatgactggagaacaagtaagtcaggagcatgtcctttgcacattaatgactacacagtgattcaggccaaggaggctgcactgaaagccagcgcttaaaaaatgatgatctaaggctcatatgcatataatctgcactttagcctcaggtatcagcagtgtagctgtgggtatcccgctagctacattctttctcaaggctgcccttctgtgacttccctctctcaagcctattgttgttgaagtttcatttgacttatataaaatgctgatatttgtgtgcatatttgtggggggtgtgtgtgtgagagagagaaagagagagaggggacggggagagagagagagagagatgctattattctttcaatggaaattataaattaaagcttttatttttattatgcgtttgaggtaaaatacatattggcaagatattgaaaaccatttccatataggcatgaagaggtataaaaggaagattggaaaagagaatggagttattaaccagatcatggaaaggcctaatttccctgagcttgggttgtgaccatcttttcagctcagcaaataaaattaaagctagaggtttttatgtttttgttttttttggagacaggatcttgctcttctgtccaggctagagtgcagtggcacagtcatagcttactgctgcctggaactcctgggctcaagtgatcctcctgtctcaggctcccaagtaactaggactacaggtcacacaacaccacacctggataatttttaaattttttgtaaagatgagactctcgctatgttgcccaggctggtcttgaagtcctagcctcaagcaatcctcctgcctctgccttccaaagcactgggattacaggtgtgagtgactgtgcccagccccaaaagctagaggttttaatacatgggaaagagcatctcagagagaggtagcaaagcaagaacttcgaaacaactaagatagcatagaaacgtaatagggaaaacagagaacactttgtcaatggtattttggctaccagaaagaccagcagctgttttctgagaggcttacctgggtgatattcattatcttgggtagttgtctagggtctggtccttagcttacatgcttggaaattttattttctcatgtatccaacagaactttctggggcaaactcacatgaattaagtttatgcaactaatatataaaaagaaaatggcaattccttaatggataaagacaaatagaagagttttatcttctggaatactcaatttaaaatgtttagcacacattctccttgtaggcaaacctaatgggaaatcaaataatgctgagaaagttgattcctaaggatggaatcataacaagtggaaatatataaattccttgtttgacagcatgaggctaagtatattggtatggctctttggttccaagtaacagaaattgactaaattaaggagaatgagaaattgctggaggatgttgagaagcttacagaattggtgagaagtttggaggactaggcttggaaataagacaggaaccaagtcagtagaaactgctcagggtgccaatcctggcacaaattctaaactggtcccttcccctccatattctcatattctgctcaggatgcaaagctgtgggagagaggagctcattgccaagtttagttgcatgcctttcttttggttattctgtgaagagaaagaggaatcttccatgggaaattattataccaactcctcactacagttgtgtttaaaattcaaattcctaatattgacacattatgacaattccaatccaaggaagtaacctaacaactagttttgaacatgtaaaatccagcagaagcaaatacaagccttctctatagggatatacttgcacaacagacttttttttttttttaaagaaataaactccacaggtggtagatgaagtctttgtgtatcttacctaacaggtccaagataagatgagatgagtgttgtgctgagggcacaaaatttaaggaagcactcactcttaggtttatgccctgtacttgcacaaaattgagagtgagtgtatccttaaattttgcaccctaggcttgatgcttgtctcactccagtcctggccctgtcataaatctgaatttggtgtttatcatttttatgcatatttcagtatttatactacatgcatgtggatctatatattcaatatacagtattgatttacatcttgtaaattttatataagccttgtactgtacatctacttctacagcttgtttttttgtttctatttttatgctgacatatgtagtttcactttattcatgtttaactgctgtttatattattttaatatagtcaaatttatttcttcattctcttgttgattaacttttagttttctttcaatacaattggcagtataatacatttttcctcgtgaacatatgctagagttttttctagcatagacacctggaagtggcatgctgagttgtaaagtatgaatacctttagttttgctagatattactagatcagctctgaaatgaggccatgagtttgtatctctgttagcagcatatgaaagttcaaccattctatatcctcacctgttattggtattgacagacctttaaatattggccagtctgtttgttttgaaatgggaccttgttgtaacacaaatttccctgaattcttgtggcattgagcatctgttcacatggatattggccatttagttttctgtgaattatctgttcttatcctttgcttgtttcttttcattgggtcatttgtctttccttgttgatttctggaaactaatgttttgtttactaaacaatcctttttattgatttcatgcactaaaacaatattttcccactcctaaatttttgttttaaattttaatttggtaaaatttatgtcttcttttctccttatggtttgtgttttttctgctttaagaaattatttctgacctcatgatgataaagatactctcctgtgtttcctaaaagttctaaaagttctaaatgtttgcttttatttgcttagtatttatttcacaatctgaaatagggatatgtgttttttccatatggataattaattatctagtgtcacttttgaatgttattgtttcttcttcagtttataatgctatttttcatgtatcatgtttctatagatatcctgtctgtggatatgatactcatttaactattctagctctaaaaaaaagccccgagtatccagtagggaatgtttctctgctgagctattgatcttcaagattatcttggttgtttttggaaactgcattttccatatggatttaggatgagcttgttcagttctgaagatatgaagaaaaattaagcagaaacttgttgggaatttgatttggatttcagtaaatttgttgactgatttggagagtatcaacatttttatattcaatggctatcttgtcttctttttgactttaaaggttatgctttaatatttcatccttaatgtctcaccaatatttgatcccacattcttttgctgtaggattttgataactaaggctaaagaagttccttcaattcatttttttttttttgctaagtgcttattttttaacattatagtatttgatacctacaaaataatacacatgcaagttatggattataatattgtggaatcacaaatacttgtgagtccacaaccaacttaagaaatagtttgttgagtctatatgtgaactgtttcacctactatctctttgatttctttccctgcaaagttacccatcttcctgaaagttgtgtttaatcatccttttgctttttaaaaagtctttactgcatatgtgtatcctcaaacaatactgttgagttatacacacacacacatgcacacacatatatacacctacatatgtatgtatatataaacacatatatatttatatatatggtgtctttggtgactcacttcttttactcaacattatgtttataaaatttttaagattcagccacaaaaatatatatagtagtacttcattaattttcactattgtacaatatgccattgtgtggttatatcatgattaattattcatcgttatgtggatgaacatttaagttatttatagttttttgccatgatgaacaatgctgatatgaacatagtatacatgtatttttttttttttagttttcttatatatttttttaatatactttaagttctgggatacatgtacagaacatgcaggtttgttatacaggtatacatatgccatggtggttagctgcacccatcaacctgtcacctacattaggtagttctcctaatgttatctctccccttgccccccatcccccaacaggcctaggtgtgtgatgttcccctccctgtgtccatgtgttctcaagttctcattgttcaactcccacttatgagtgagaacatgcagtgtttggttttctgttcctgtgttagtttgctgagaatgatggtttccagcttcatccatgtccctgcaaaggacatgaactcatcttttttttatggctgcattgtattccatggtgtatatgtgccacattttctttttccagtctaccattgatgggcatttgggttggttccaagtctttgctattgtgaatagtgctgcaataaacatacatgtgcatgtgtctttatagtataatgatttatgatcctttgggtatataccaagtaatgggattgctgggtcaaatggtatttctggttctagatccttgaggaatcaccacgctgtcttccacaatggttgaactaatttacacttccaccaacagtgtaaaagcattcctgtttctccacatcctctccagaatctgttgtttcctgactttttattgatggccattctaactggtgtgagatggtatctcattgtatacaatgacccctgatgatgagcgttttttcatgttttttggccgcataaatgtcttcttttgagaagtatctgtttatgtcctttgctcaatttttgatggggttgtttgtttttccttgtaaatttatttaggttccttgtagattctggatattagacctttgtcagacggagagattgcaaaactttcctcccactttgtaggttgcctgttcactctgatgatagattcttttgctgtgcagaagctctacatttattgatttgcatatgttgaaccagtcttgcattccagggatgaagccaacttgattgtgatggataagctttttgatgtgttgctggattcggtttgccagtattttattgaggattttcacatcgatgttcatcagggatattggcctgaagttttctttttttgttgtgtctctgccaggtgttggtatcagggtaaggctggcctcataaaatgagttagggaggagtccctctttttctatgatttggaatagtttcagaaggaatggtgccagctcctctttgtacctctggtggaattaggttgtgaatccatctggatctgggctttttttgattggtaggttattaattactgcctcaatttcagaacttgttattggtctattcaaggagttgacttcttctgatttagtcttgagagggtgtatgtgtccaggaatttcttctagattttctagtttatttgtgtagaggtttttataatattctctgatggtagtttgtatttctgtgggatcagtggtgatatcccctttatcattttttattgtgtctatttgatccttttctcttttcgtctttattagtctggctagtggtctatctattttgctaatcttttcaaaaaaccagctcctggattcattgagtttttgtgtctctaactccttgagttctgctctgatcttagttatttcttgtcttctactagtcttctacgagcttttgaatttgtttgcttctctagttctttttttttttttttttttttttttttttgagacggagtctcgctctgttgccccagctggagtgcagtggcacgatctcggctcactgcaagctctgcctcctgggttcacaccattctcctgcctcagcctctggagtagctgggactacaggtgcccgccaccacgtccagctaattttttatatttttagtagagttgggggtctcactgtgttagccaggatggtctcgatctcctgacctcgtgatctgcctgcctcggcctgccaaagtgctgggattacaggcgtgagccaccttttatttgtaatgttagtatgttgattttagatctttcctgctttctcccgtgggcatttagtgctataaatttccctctaaacactgctttaaatgtgtcccagagattctgatacattgtatctttgttctcactggtttcaaaggacttatttatttctgcctttatttggttatttacccagtaatcattcagaagcaagttgttcagtttccatgtagttgtgtggtttttagtgagtttcttaatcttgagttctaatttgattgcactgtggtctaagagaccatttgttatgatttcaattcttttacatttgctgaggaatgttttacttccaattatgtcgtcaattttagaataagtgctatgtggtactgagaagaatgtatattttgtttatttggggtggagagttctgcagatgtctattaggtccgcttggtccagagctgagttcaagtcctgaatatccttgttaattttctgtctcattgatctgtctaatactgacagtgggttgttaaatctcccactgttattttgtgggagtctaagtctcattgtaggtctctaagaacttgctttatgaatctgggtgctcctacattggttgcatatatatttaggatagccatctcttcttgttgcatcgatccctttaccattatgtaatgcccttctttgtgttttttgatctttgttggtttaaagtctgttttattagagactaggattgcaacccctatgtgtgtctttacatgtgagatgggtctcctgaatacagcacacctataggtcctgactctttatccaattttccagtctgtgtcttttaattggggcatttagtccatttacatttaaggttaatattgttatgtgtcaatttgatcctgtcgtcatgatgctagctggtaattttgcacattagttgatgcggtttctccatagtgtcgttggtctttatattttggtatgtttttgcagtggctggtacaggtttttcctttccatatttactgcttccttcaggagctcttgtaagggaggcctggtggtgacaaaatccctcagcatttgcttgtctgtaaaggactgtatttctctttcactgatgagcttagtttggctggatatgaaattctgggttgaaaattcttttccttaaaaatgttgaatattggtccccactctcttctggattctagtgtttctacagagagatccactgtcagtctgatgggcttccctttgagggtaacctgacctttctctctggctgcccttaaatttttttcttcatttcaaccttggtgaatctgatgattatgtgtcttggggttgctcctcttgaggagcatcttagtggtgctctctgcatttcctgaatttgaatgttggcctgtcttgctaggttggggaaattctcctggataatatcctgaagtgtgttttccaacttggttccattctccccatcgctttcaggtacaccaatcaaacgtaggtttggtcttttcacatagttccatattctttggaggctttgttcattccttttcattcttttttctctaatcttgtcttcactctttatttcattaagttgatcttcaatctctaatatcctttcttctgctttattgattcagctattgatacttgtgtatgcttcatgaaattcttgtgctgtgtttttcagctctatcaggtcatttatgttcttctctaaattggttattctagttagcagttcctgtaacctttttgaaggttcttagcttccttgcattgggttagaacatgcccctttagctggaggaatttgttattacccaccttctgaagtctacttctgtcaattcattaaactcattctccatccagttttgttcccttgctggtgaggagttgtgatcttttggagaagaggcattctggtttttggaatttcagcatttttgggctggcttctccttatcttcttggatttatctacctttgatctttgatgctgatgacctttggatggggtttttgcgtgggcatcctatttgttgatgttgatgttatttctttctctttgttaattttccttctaacagtcaggtccctcttctgcaggtcttctggagtttgctggaggttcactctagactctgtttgtctgggtatcaccagtggaggctgcaaaatagcaaaagttgctgcctgctccttgctctggaagcttcgtcccagaggggcacctgccaggtgccagccagagctctcctgtatgaggtgtctgtcatcccctgctgggaggtgtctcccagttaggaggcatgggggacagggacccacttgaggaggcaggctgtcccttagtggagcttgagcattgtgctgggagatctgctgctctcttcagagctggcaggcaggaatgtttaagtctgccgaagctgcacccacagctgccccttcccccaggtgctctgtcccagggagatgggagttttttctatacacccctgactggggctgctgcctttctttcagagataccctgcccagagaggaggaatctggagaggcagtctggctacagcggctttcctgagttgcggtggtttccacccagtccgaacttcccaatggctttgtttacactgcgaggggaaaagtgcctattcaagcctcagtaatggtggatgcaagctcgagggtcccaggttgacttcagactgctgtgctggcagtgataatttcaagccagtggatcttagcttgctggggtctgtaggggtttgacctgctgagtgagaccacttggcttcctggcttcagcttgctttaaaggggagtgaatggttctgtctcgctggggttccaggcaccactagggtatgaaaaaaaactcctgcagctagctcagtgtctgcccaaatggctgcccagttttgtgcttgaaacccagggccctggtggtgtaggcacctaagggaatttcctggcctgtgggttgcaaaaactgtgggaaaagcttagtatctgggccagagagcaccatccctcatggcacagtccttcacagctttccttggctaggggagggagttccctgaccccttgcacttcccaggtgagctgacgccccaccctgcttatgcttgctctccatgggctgtattcactgcctgaccagtcccagtgagatgaactgggtacctcagttggaaatgcagaactcacccaccttctgcattggtcttgttgggagctgcagactggagctgttcctattcggccatcttgccagatccccacatactatacatatcttatttttgcccatatgtaagagtttttccaggttaatagctattagatgaattttgagttgatatgtgcaagttctcttcttcaagttattgccaaactgttttccaaaatggtggtaccaatttatgctctcatccacagtgcataagagtttcccctattccctatccttgtcaattcttggaattgtcagatttcttaattttttttttttgagatggagtctcactctgtcaccaggctggagtgcagtggcacaatttgggctcactgcaacttccgcctcctggtttcaagcgattctcctgcctcagcctcctgagtagctgggactacaggtgcacgccaccacgcccagctaatttttgtatttttagtacagacggggtctcaccatgttggccaggatggtctcgatctcttgacctcgtgatccgcccacctcggcctcccaaagtgctgggattacaggtgtgagccaccgtgcccagcccagatttcttaattttttaaatctagatgatataaaatagaatctcattctttgctcatcaattctttatgcatctcagctcgagaacacttttttttttcctttgtacttattattctgagggtctaacagtaacacatctctttctctctttctctctctctctctctctctctctctctctctctctctcccctttcctctctttggccttaagatgtctttattttgtgtgcttctcagagtgatagtttagatgactatagaattatagttctttgagtacattggaaattttccattgtcctctgccttccattgcactggaaggggagctagcataaagtttaacttgtattattttgaatgtaacatcttttctctataactgtttagatcatctctacattttttgctgtcctgaagtttcattcttctgtttttccatgtgggtttccttttatttaacattttggggtacgagggcttctcaaatagatgaattgatgtctttcatccgtctggaaatatctccaatttttttcttttgaaattttacctcattctccttttgtaactctagcaagatttatgtttgcttctctcactctctgcttatgtcccttaacctctcttttagagttactatctttttcctctctgagttgcattcttattaatcttaggtctgccttccaattccgtaattctctcttcagctttaatctgtcctttaactcaatcattgatttttaaatttcacttattgtattatttacttctagaagttttgttttgttctttaaaaatcttctagtcattttttcaatgtcttgcttcctatttatatttttattttttcaagacatatttgtcaagaactgtgaaggctatgagattttaattttttaaaatccacagttttgtggatgttgaaagaagacatgagactcttggctaagagcaaaagactttattactcacagcaagagcagcagccagagtgtcaacatgtttgttttggttttctatgttccaattcctagaaatgggcctagatagatacctgcacaggaagggaacattgaccttgggaaacttgccattttatagtaggtaataaacaagctggcattttgtttaagggggaagtattagctcatctctcaagttttcttgctacaagcccaatcctgaaaaataatctgggtaaagatcagccagggccttgaatttttggcatatatagcaagacatgtaggaacaagagagatccatggagtagtgttgcctaacaatattaaatatagtgattttgtattctgagtgtggtaattctaaaaactgtgggtctcagtgtactatctgttgtttcttttggctcttgaacatggtgttttgtttctttgtgagttttgtgatttttgacagtgggttcatttttttttttttcttggaaagaaggaaattttctccagagagaatttgcatttgtttctgggagcactaccaacgggaaactacttgaaaataaattcttatcttgatgtttttcagaccacttaatgtgtctacaggctagaaatctacagatgggcgtgcttgtggtagtaaattctaaggagaaaatgactccccctctctacccctcctcagcatcatatataaagatagtcaactttccttgtattgtcacagaagatatagtattactagctcaccttgatgctgagggaatcacattttagggtctcagttttatgcagtggggatttcctgttagattctctcccataagctaaccttgggctttgtatattgttccctacttgctttaaggtaacaagtcctatgttggttagagtaacattaatgctgtaacaaatacagtataaaatttaagtagcttaacataataaaagtttatttctcaatcatataatagtccaatttaggtgtttctggtgggagtgccccttttctccatgtgataatttagggaccaaggctactttcttcttgaagctccaccatcctctgggacctgggaatcttttgtattcacctggcaattcacaaaaaaagaggttgaagaagacacacccaattcttaactctctttgaccagacatgcattgtattagtttaccttctatgactgagaattagtcctgttgttccatacagatgtgagggatgtgtgatggggagatgtaatctctggctgagctgctacttaccagtgatgactcaatactatggaaagtgaaatacaaattgaattttggtgggcagttaagtgtcacagaaaacaaagtttaaatttacctggtttggccaatgacgtctgaatggaagctgacttcaatgcctatctgtgggttctgctttcatttaccttttggcttttaagagttcttaattttttgccagcctgtcatgtattaaaaaagatattttagttttattttatcaagttttttgtttgtttgtttgtttgttttagttatttgtagtgggagagtgaactagggtatttagtccactgtactgctggaactgagtcctacacactcctgtgagttatttagaaatgtgatcttaaaagttgaaagtctatttttttaaacttaccttttgaaaattacttcacttggtcagaaagtggcatctagataatgttgaatttctattttttggccatatttagttaattttttggccatatttagttaagtacctgcttgcacatgaatattcgtaactgacatcttgcaatcatttaaaagttttatgtagtcacaaatcagtttgtcaagtatatttaaaatgaaaatattattttcattttcaatgtagtgattaactgtaactattctatgcctttaaaattcaaatatttaaaatttaaacgataaataatacctatatgtagtagaaaataatgaaatctttattaaagggttaagtatgacaaatatctttatataatttcagtacctttttaaaaaaaaagagcaaggaagcaatgggagaattggacatgttttgtggtgatgtgttcaattttttgattggtgattacatgggtgtacgtatttgtcaaaactcattcaactatacatttaaaatggacatattttattatatgtaaatgatacctcaacaaagttgatcttaaaaaacggacaatgggatgagggaatagaattaaataaataaatcagtcattgccatacagtgtgctgtaataagtgtccacaggtatttcgagagcttagagcatgtaatccagcatgagtatgggcactcataggtgtgcatgtcaaggaaaggaagcttctcactgagctgatagttgagttcattctttttttttttttttttgacacagagttttgctcttgttgcccaggctggagtgcaatggcgcaatctcggctcactgcaacctctgcctcccgggttcaagcgagtctcctgcctcagtctcctgagtagctgggattacaggtgcctgccaccatgcccagctagttttttgtatttttagtaaagacggggtttcaccatgttggccaggctggtcttgaactcctgccctcaggtgacccacccgtctcggcctcccaaagtgctgggaataaaggtgtgagccactgcgcctggcctgagttcatttttttttttttctttgagatggagtcttgctctgtcgtccaggctggagtgcaactttgacctccctggttcgcttaaaggaaaggtagaaactagcctggcaaatggaatttttgaaggggaattggatcaaatatttctggatcagggaaaactgtaaaggggagtgttagagagaatgtcctaccatttagagcatctgtagcagaagaggaatggcaagagatgaagccaagaggaaacaaataatgaaagtcttcacgtctcttacttagaaacttaggaagtatcctgtgggcactgtgcagtcaatgaaaggtttttggcaggctagtgacatgttcagatttgtttttagaaatgctagtctgtcagacatgtttaggatggccgaaaatacttcaaaacctctctagcccagattgctgtctctcttctctgtccacactatgctagccagtgctcaagtagtgattatttggggttgttctttttttcatgatagtaattcttcctctccaactagactgtctgtccttcagaccaggcctcttagtcttcttctttttaaaaaatttatattcccatattgataggtcacccccttagtcttaattctacttcacttatgactcccaaagcactggtactactagacacaggttgaaataaatatttgatgattgactgatgaattattttcattatttaatggtaataccctgtttctctaaattgtaacatcaagcagaatgttgtcatctttgggtactaaggtgattcatttgactcaccattggataacacttagttgggtggtttgtttgtttttttttttttgtattgctgattgaatttgcacggagtcatccactatgcactggacttatctatgttcaatgttttacaagaataccacaacgatatgcaatgttctctatggctatcgaacagagatgttctctacgtgaaattaaactggcgaatgtctgtatggagactggacatatgacctcttctctatccagctcaggaatggggcttcacattgtaaaatcacattcttggaggaggaaatagtaagtgttcatcatgcatgctttggagattaaatcatacacatctgagagacaggaagagagaagtttttaaaaactggatggcaatttaggcaagcagtgggagtgtattgtattaaactgtgaaaagccagctatttgctgaattgtggtttgatgacagagctagggtccttctttatgattctgaatgaatttctatttcactctgccacaaattttcatatgaggcaaagggatagaaatttactttctaggaagttattaatatataaaaatgctttgatatatgaatctctgagatgggtaaaatagacatatcagtagtgagaaatggaatattgagactgaataatattctgttgggtttacaagaaaaagaaaatatcatttattgagcatctattctgtgtcaggaactgcacttggtgctttcatatttattaatatatttgtcacagccataggtacattttcattttactcataaggattatgaagattagaggttaaggcacatgctcaaatatacatagctgtttggtggcagagtaagattgaaattcatttgtctctcatttgtctttgttctataatctcctcatgaagcaaactaccaaaattgttaaatcactctaattttacatttagttttcttgtccagaccataaccattcctggccagggcatcaacttcagctcaataactggtaccaatcttgctctgttagaccttggctctgcaatgcccatgtgaacaaataccagtgtgcccattgagtcataatcttcttccattcctcaaagtgctggctcagttggtgtggctaggcttctatctcagttctcctatatatcatctgtcttagccagttggactgccacaatgaaatagcacagactgggtggcttataaacgatagaattttttttttttttttgagacggagtctcgctctgtcgcccaggctggagtgcagtggcacgatcttggttcactgcaagctctgcctcctgggttcacaccattctcctgcctcagcctccagagtagctgggactacgggcgcctgccaccatgcctggctaactttatatatattttagtagagacggggtttcaccgtgttagccaggatggtctcgatctcctgaccttgtgatccacccgccttggcctcccaaagtgctaggattacaggcatgagccaccgtgcccagccaacaatagaaatttctctctcacagctctggaggctgggagtctgacatcaggatgccagcatgtttgggttctggtgaggttccttctctgagttacagatggtgtcttctcaatgggtcctcatgtggcagaaaaagttggagagctctttggggtcccttttataagggcatgaatcccattcatgaagactctaccctcatgaccttattgcctccccaaagctctgcctcctaatatcatcacactgagggggttctgttttcaacctaacaaagtttgggaacacaaacattcagtccatagtaggacccagtttctcagagagactgtacctatttaaatggtgcccttaactccatcctatttaaatagaacttagaactctgttaggctccatgtagctctgtcttctgcataattgagctctgttccacttaccccaagctattaattggggtctaattgtaaacagtctgtttggaacctggctatttttacccaatccctgaactcctgttgctttcttggatatgaaagcttgccagaatcacatcagagttttcctatgcccttgttttgtgttccttctgagcttggttagtcacgtgcagccataagagatacaagagaggctcaggaaaaaacaaaggttattacacttgcaggtcctagagagaggagatattctgcatgggaagacacgattgtggtcatgaggcagaagacaagagtgagtgggaagcttagattacttctgtattggggtttttgaggaaaaggcatgccacggcagggagaatgtttgggattggttagtttgaacacttttggtgggttttgtgctataggagtagtttctagttgcctagtacctggccctgggatgattaaggcagataaatactgtctcctgaagtatccaggccaaacagaggagataaggcttttgcttggttaatttgcacatcaaaggtatgctctctgacttttgttatctttaagaattagctagcccagggaaggcagtctctcccagttgtaaagtttttaaagacatcaaaacatcataatatacagaaaattaaaaaatatttacaatacagtccttgggacacatcttaccaaacagcctgctactaccatgggacacatacctctagtcagggaagtctctccagctccagtttgtcaactgtcttattcttttccattggcccttgttgccagtctcaagattccttgtgattaagaccacctgaatatgacatgatgcatttaataagtttcttagtctaaactaaaggtggatactgaggatattaaagctttcattatggttaaatttcactgttggtattagaatgtgctcaagtatcacctcttccaggaagacatccttgatttttctggtcagggttagtgaccctcctgtgtggtactgtaatatctctgcatatctatcttataagactcatcacattaatggtacacacatacctcgtggatacctggtttgtttccagaccacctcagtaaagcaaatattgcaataaagtaagtcacataaatttttttttgttttcccagtgcatataaaagtgatgtctacattatactgtaggctattaagtgtgcaagagcattatatctaaaaagtacatatcttaatttaaaaatactgtatttctaaaaaatgctaatgatcatttgagccttcagcaagtcataatctttttgctggcagagggtcttgcctcaatgttgatggctgctggctgatcagagtggttggctgctgaaggttgcagtggctgtgtttcttaaaataagacattaatgaagtttgtcatatccattgactcttcttttcttgaaagatttctctgtagcatgcaatgttgtttgatagcattttactcacagtagaacttctttcaaaaccaaagtcaggctgagcatggtggctcccaccagtcatcccagcgctgtgggaggctgaggtaggaggattgcttgaggccaggaatttgagactagcctgggccatatagcaagatccagtctctgcaaaaaaaaaaaaaaaaaaaaaaaaaaacctgggtgtggtggtgtgtgcatgtagtcccagctactcaggaggctgaggtgagaggcttgcatgaacctcagcaatcctcactcaggaggctgtagtgaggtatgattgcaccactgcactccagcctgagcaagagagcaagaccctatctttaaaaaacaaacaaaaaatgaagtcagtgctcccaaaccctgctgctactttatcaactaagtttatgtaatatctaaatcctttgttgtcatttcaccacattcgcagcccattcctcaggagtagattccatctcatctcaagaaaccacagtctttgcttatctataagaagtcactcgttgtccattcaagcttactgtgagattgcagcaatttagcctatctttgggctccacttctaattctagttctcttgctatttccattgcactggcagttgcttcatccattgaagtcttgcacccctcaaagtcattcatgagggttgaaatcaacctcttttaaacttctgttaatgttgatattttgaccttctctcatgaattatgaatgttcttaatgacatctagaatggtgaatcctttccaaaagattttcaatttactttcctagatccatcagaggaatcattatctatggcagctatagccttatgaaatatatttcttaactaatcaaacttgaaagacaaaattactctctgacctatgaaatgatattgtgttatgaaatgctgtgaaatggatattgtgttagcaggcatgaaaacaacaatctccttgcacatctctggctcttgggtgaccagccacattgtcaatgagcagtaatattttgaaaggaatatctttttttctaagcagtagtctcaatagtgggcttaaaatattcagtaagctgtatatgctgtaaatagatgtgctatcatctaggctttattgctccatttatagagcacagccagaatagatgtagcataattcctaagggctctaggattttcagaatggtgagtatttgctttaacttaaagtaagcagctgcattagcccctagcaagagaatcaacctcttctttgaagctttgaagtcaggcattgacttttcctctctagctatgatagtccaaaacggcatcttcttccaatataagactattttgtctacattgaaaatctgttgtttagtgtagacaccttcatcaatgatcttaactagatcttctggataactttctcttgctgtagcttctgtatcagcatttactgcttcaccttgcacttttaagttatggagatgtcttcttctcttaaacatcatgaaccaaccgctgcaagcttcaaacttttcttctgtagcttcttcacctctctcagccttcatagaactgaagaaagttagggctttgctctggattaggccttgttaaagggaattttgtggctagtttgatcttctgccagaccactaaaactttctgcatatcagcattaaggctgttttgctttatcattcatctactcactggagtagcattttaaatttccttcaagaacttttcctttgcattaacagcttggctaaccatttggcacaagaggcttagcttttggcctgtctcagcttttgacatgccttcctcactaagtgtaatcatttctaggttttgatttaaagcaagagatgtgtaactcttcctttcatttgaacacttagaggccattgtagggttattaattggcctgatttcaatattgtcatgtctcagggaatagaaaggcatgaggagagggagagagacaagggaacagccagtcagtggagcagtgagaacacacacagctttgatcaatttttttccagcctacatcatgctttgaatacataatagtaatttaaaagtttgaaatattgcgagaaaattaccaaaatgtccagagacatgaagtgatcacatactgttgaaaaaatggcaagacctgcttgatgcggggttgccacaaaccttcaatttattatgcagccaacaaacatatgaaaagaagctcatcatcactggtcattagagaaatacaaatcaaaaccacaatgagatgccttctcacaccagttagaatgaccatcattaaaaagtcaagaaacaacagatgctggagagggtgtggagaaataggaatgcttttacactgttggtgggagtgtaaattagttcaaccattgtggaagacagtatggcaattcctcaaggatctagaaccagaaatgccatttgacccagaaatcccattactgggtataaacccaaaggatcataaatcattctactataaagatacatgcacatgtatgtttatcatggcactgttcacaatagcaaagacctgaaaccaatccaaatgcccatcaatgatagactggataaagaaaatgtgtcacacatataccatggaatactatgcagccataaaaaagatgagttcatgtcctttgcagggacatggatgaagctggaagccatcattctaagcaaactaacacaagaacagaaaaccagacaccacatattctcactcataagtgggagctgaacaatgagaacacagggacacagggaggggaacatcacacactgggacctgtcaggacatggggactaggggagaaatagcattaggagaaatacctaatgtagatgacgggttgatgggtgcagtaaaccactatggcacatgtatacctatataacaaacctgcacgttctgcacatgtaccccagaacttaaaatatatatatataaaaaaacacagtatctactaagtgctataaagtgaagcacaagaaaacaagctgcctatacttttatatttacatattgttgtctctcaaactaaaatgtaagctcctcaagggcagggcctctgtcataatccatctttatgtgcccaatattattcacagtatctggcacatagtgagaacctaacaagtacttattaaatagagaaaatgtgtagagggactaagaggttggtctccagagacagactggccatgatgtgcaaattccttaatctgtatttccgtttctttatctataaagtgggtacactaataggattgttatgagaattaattgagttataatatgtaaattgcttagaatatagcttggtacataataagcaatagatgtagacttttattgttattgagtgaatcagtggggaaagagtacaaaatgttacaccacatgggcccaccaattgtacaatagttgcttttgactcctgctgcctgaattcaagatttccctcacattctggaaagccccacactccaggatcctttgtttttaagtgcctgcagaatttgtactgggtgacacagttgtttggctccaatgagactaccctgctaatatttgtaaagggtgacctttcacaaaggaagacaattggcctgaactaaatagcattgtgttgagatacaaaaattatttgcaggggagaccagatatgggtgtattattaccacaacaccaggacttcagtccagggttctcctgctcaccacacagaaagccaatcactgagataatgagcattgccagggaagaagggtttgagtgcttcagccaaggagatgagagaccagtctcaaatctgtctcctcaactgcctaaaattaggggctcatgtggcagggaagaaatgtaaccatgtatgggaaaacaggaatcagggaggagtaaggaagaggaactgatcaataggaagtagatggtcagtgggcagttattatgggtgaggggtctggcatcccattgtccagatgtggtgatctggtaagtttcagttccttgatactatctgggagccctaatggtttcctgagaaaggaactcagataatacaaatataagtttttcaagttttaatactgagagggtcaatttctatatttattcaaaagaaaccataaacatcacttctatgggacaattgggctggttccagtcccgatctttctatttatcagttcctcaatcatggagaatatggttgtcgatctttcgggctgcttcatgctaaaaagggggcattgtgagcagctccataccatgggtaaccacgtggccacccaggaatcaaacgttaatttaataccatagttttcttctgtgatacaatctttatgtctccaatccactacttccaccaaagacaaatcatagcaggactaacctacctgaaaaataagcatcagtcccactatacttggcctgattacccatataaagtgcagcaagaatcattgtccatataggctcttctacattggctttgctggaacctctcacaaggaatcagattcaacctccaaaggcctctcaagcctagccaaggatccatctgtgtctacagatatttacatgaattgggtgaactcctctctttccaaggccccaaaagaacttgtggttcctgggcctgccaggaaggtgactctctacttaccacaggccaggaaccctgcaaaggaactgcatagacaaggtatgaggcatctttctaaggggttctcattggctctataaaatcaatgtgaattcctcaaagctgtgtgctcatatcccaaaacatgccattttagtccaagtcctagaaaataaccagtgcctccaattgtttccaaatataagagaaaacagattcttactgatcttgcaaacaaccacattgcaatgaattaagaacattcacaaagtttctgaattctggataaatctggcagagagggagaaatatgcctcatttctgtatactcaattgttaaaggctataaacagctcaaaagaaaaaaattctgaagactctgagaaacaaaacaaaaagaatcagtaatgtttcaaacaaaaaagagccatgaaaattatttcaatcctcctgtagttcaatccatgcaatcagctcttgttctgctttatattaggttagcagtctttatgaacacatcagcctttcaattagtgttctggaagttttctctctggtccaatggcacaatctccaaagttatcagaaacctgcaatcaggagtccttttcatgaactctcccaaggaagccctgggttgtagctgattataagctgctttttgagaagaatcaaagcaaaacaacaattgtggatgataaaaatcttaggatagctatagtcaaagacacaattgacaagaaagtttgattatttctgtggcatccaacaatttaacataaaaatcataatttttactaataacatattgagacatatcagaatttcaggaatctcatacaatcctagaacatgtctatataaatataacccaaagaaataatgctaaatgatgagttaatgggtgcagcacaccaacatggcacatgtatacatatgtaacaaacctgcacgttgtgcatatgtaccctaaaacttaaagtataataataataaaattaaaaaaaaaaaagaaagttaaacaccatcttggccaggtgtggtggctcacacctgtaatcccagcactttggtaggccgaggcgggcggatcatgaggtcaggagttcgagaccagcctggctaacatggttaccactagaatcttcaaaccagtacaacacttgtacatactttgttttcaagtacacacatgaaggcccaacaatgataaggtttgggatcaaaaatcactagaatgtctcactttttttttttactactacttaattcaagtgactgtcacttaatatgaataatggtaaacacagctaaagtaatttgagagaaactccagtcaatataattttctaaaggacaaggtcaatctttcctgaacattaaaactttgtacccatatcaagtttttcctcattttctaaaggaaaagatctgaaaccaactcaaattattgactaaattgaattaccttggaaataaacaccatttaaacatatccactcccatctacttttccaaataacaaaatattgtactatttctgttcagaacttataaaagtaagtcttttaattttgtccaagagctttataaactcttatagatcattaaaggaaagcataaccaatgctaatgatcctatagatcattagaggagagcaaaaccaatccaagtttaaaaggctggtgtgctctatcatttttttttttgaggcttgacaaaggtagcttaggaattttagatagatagagcaaatgatgaatgttggaaaaacatgggaaaccaaatggctatccatagaaccaaatgcaagcttttcattaggaactgaaaactcatggctgggtatagtggctcacccctgtaatcctagcactttggaaagccaaggtgggaggattgcttgagaccaggagtttgagaccagcctgggcaatataatgagaacttgtgtctactaaaaattaaaaaaaaaattagccagatgtggtagcatgcatttatagtcccagctactcgggaggctgcagtgggaagatagcttgagcccaggagtttgaagttgcagtgagctatgatcatggcattgccctccagtctattcagcctgggcagcagagcaagaccctgtctcaaaaaaaaaaaaaaaaagaaactaaagaacatcaatgtatatataagtaatatgtatatataagtaaaacccaaaggagaacaaacagcaaataaatgaaaattaaaagcaaaaacagataaataggaagccccaaatttttctcttactcagataaccttggaggctacagtgttacccacagcctaaaacacaaaagcacgtgacggatattttgctcctgatatgcaaatgaatgttcttaagtccaccaacgcccctatacattttgtgcaattaagaaattcacttcagggatgtgaccagttaagtactttagtgctagtactatctatgcagaatagaaaatatagtgtgaaacaaatcaatgcaagcatttagtgaaatttggctccatgctaaatctggcttcgtgctcaacaatattaaaaaagaattgctggccgggtatggtggctcacacctgtaatcccagcactttgtgaggccgaggtgggcagatcacctgaggtcagaagttggagaccagcctggccaacatagtgaaaccccatctctactaaaaatacaaaaattagctgggtgtggtggtgtacacctggaatcccagctactcaggaggccaaggcaggagaatcgcttgaacccaggaggcagaagttgcagtgagctgagacagtgccactgcactgcagcctggatggcagagtgagactccgtctcaaagaaaaaaaaaattgcccaactgccatgtatttctttaaaatatttcttgttttactttatcaagactaagagctttaactatgagcaatgttaattagcccaatatctcaaattttctctcaggttttaaagaatattttactgtctaaacttccgtcttctctgtatgtgcatgaaggtagacacacagagaaacagaaaaaaaaaaaactacatatgacttacacagaacaacagaaggaccatgcatggactttctgttttgtcttaaattctctttatttttaaatagccagttattttattttaggacaaaaatttaccgttccaagattctttctcatacaaaattcttttttactttataaccttttttaaaaaaccgaaaatacatcttcatatccataactttcttcacatctctctcccctacttaccagttctattctaccttatttcataaataaccttttcaagcccataatttgaactaacctttagataacttttttttttttttttttttttttggagacagggcctttgctctgttgtgcagtctgaagtgcagtggtgtgatcacagctcactgcagccttgacctcctggactcaagcaatcctcccaacttagcctcccgagtagctgggactacaggcatgtgccaccacacctggctaattaggaaaaaaaaaattgtagagatgaggtcttactatggtgcccaggctggtctcaaacccatgggttcaacttatcctcctgccttggcctcccaaagtgctgggattataggcatgagccagccagtaacttctgaattaaacaaaattattctttttctcagcaattttatatacggaattacatattacatattaactacaattcttattcttagtatccttaagttttagtgaaaacctaggaagcaagaatcctgaactgtcatataagatattagcattttatagataaggaccattccacaatttttggaaatatgtttccctgtatcataaccttttcttgattgggaattacctagacatctaatgaacatcaaaaatgattttaagattttaaattacatcatgccatttctatttcattcagttttttcatttttaacagttttacctagattacttatgagaactgagatattagacaaagctagttgtcatttccttgttaacaattttgtaacctgtgaatagcagtaaggtccttaaagttaactacatgggtattttcaccaatactcagaagactcagctatattcattaaaccaacaacattaaattagtcttatttggcaaaaattgcacaaagatcattttgttttggctgagtttatagctttataatcttctgtgccaaaccctgacacctcaaaatatctacagagacaaatacaaaacccagacaaaaatgtatgctgacaattccaaagtcacatctacttttatctcaccaataattttaaagctagattgcttattaaagatttacataagtcacatgaacttgaaacatgcttggatagatttaattatgagctttcttttatttataagccaatttggtagacacaacatataacataataaatgttacacaatacataaacatgtaaacatgatacacaaacataaagctccaatagcttttactttggaactctgtagccatgagatagtaatacaaactcaccagtttacaaacacgttcacgtggctacactttgtttaccctgataggtaatctaatgaaggctgagacccaaaattttgggtaaggtcgtttccatggcagtttgatttttaaaggccaaacctcctcatactccaaagaacactgaggtcaaacagcaccataaaacatcatgtattaaccaggcccgacccagcttagaacagcagcataaaagtctggatacatgaaattccatcccactttttctttaaacatcaaaatgaggcccatggaaaggccacacttctctagattgcaaagaatattggggcaaaatagtattacaaaagatcagtttataaaattctgatttcccatgactttattaacacacatatgtagacaatcatcaaaacaccatccaactgctgcagcaacaagccccaagcatgtccagactgaaacagtccaggtgcttttctctctcaattggttgggcttgtttaacctgcaaaaggaaactccttcagaattcccctaattgagaggagcagatcctgctgtctgttacccatgaaagacatcatctgtccagatgcagatgacaaatttcaaaggctgttcttcctaggtgatcaggaatgaagttggagccagcagtgatagtaccagagagacagagagagagagactgaaacccatctctggccaaaaaaggggttaggcagctgcctaggagggcttctgaaactcctggcccatgcattcccaataagggaaccaaaatctgttaccaaaacaccaggggttcagtctaggtcatgctgctcaccacacagaaagccaattactgaaatattgccagggaagaaggctttaattgggtgcttcgcttgaggggagaggagaccagtctcaaatccgtctcctcaactaaaattaggggtttatgtggcaaggaagaaatgtaaccatatgtgggaaaacaggaattagggagggaaaaggagtagttgggcaacaggaaataggaagtcaggcgatcatgacgggtgaggggtgtggcatctcattgtccagatgtgttgatctggtaagtttcagttccttgatactttctgggaggtcttatggttggtttcctgagaaaggaacccagatcagacaaactttttcaaattttaagcctggaagcttcaattctatgcttagtcaaaagaaaccataaagatcagttctatgagacaattgggctggtttcagtgttagaaccactcatctctactccctccctcccctgtggatgaggtggtaccatactgcagtaagcattgtgcttctcagaggaagtgttcctgaacccaagtggaaggctgggttataaaccttaccttatcctggctgctcagctgatggttatttgaatgggaaaaggcaaaacttctccaagaggataaaatgagataggacttatttctagagtgcttggtcctgtaaaaatctactggacatttgcagccaatttagccctctctgtttggctccgaggcctagaatgagtcctgctttcactataccagacatgaacatttctttacattttagtgtagagagctaaggaaactccagtggaatttagtaaacaaagaaaaaaaaaaaacaagaaaaaaaatgaccagttttttcagggcctggaaattattcattcttggggccttaggtctctaagaaaaagtttgcaaagcagttgttttagcctattgtttcccaaaatatgttcactgtctcctttttattcctttgaaaacttgggagtctcctttttattcctttgaaaactccgtatgtcaagagaagcttgacatcaggcaataaacaggtaggggatggggtaagaacttaaacgctgaaatgtttcccatgaaagggaatagaagcatcttctgttctttaaactcatctttccttttgatacgtgagtgctgggaagggaagagcgtggttcctttaaatgatatggaagcgggaagggaagtgttggatagcggaggacatggtccctggctagggctccacccccacggacctaggtgaggacaggcacttgtgccttcactcctaaatgttgcgtttcccaacaccaccctggcctgccatgcccccatcctgggcctataaaaacccgagaccctagcaaggcagagacagaagtggctggacgtggagcagagcagataggcggaggaagacacaagtggctggacggtgagaggacacggaggggaacacgccggcggaagagcattttgacagacacaggcactcaagcaggctattgaccagcaggtttaggcggagtttggccagggcagtcggaggagagcgcccgctgcccagcggcccaactccagggataaaccatctcccttctggctcccccatcggtggacagctgcttccactcaataaaactttgcacttattctccaagcccacgattcttccaaggcaggaacctgggatacagaaagccgtctgttcttgtgacaaggtggagggtctgattgagctggttaacacaagccgcctatagatggcaaactaagagagcaccttgtaacacacgcccactggggcttcaggaactgtaaactctgctgtggggtgcccaagtctgtatgctcccctagaggtttgagcagcaggacactgaagaagcgagccacacctccgtcacgtcctgggagggggacaagggaacctttcctatttcactttaagagggcagaaatgagaaagaaatgacattttttaaatttttccttagctaacaaatgtagggtgtctgggaaagttagtagttcttcctacagtagtagaaattgaaaaaccttcactggaaactctactcccatgtcctggcatctgagaaagttacctgctttacttgatgggaaaccttggtctacaggaaagtttgctgatgaagaaaatttcagaaagggggagattttggggttggcaggctcctgtgtaggaaacagttaacattctttaaaaaaaatttcactctgggccgggcgcggtggctcacgcctgtaatcccagcactttgggaggccgaggcgggtggatcatgaggtcaggagatcgagaccatcctggctaacaaggtgaaaccccgtctctactaaaaatacaaaaaattagccgggcgcggtggcgggcgcctgtagtcccagctactggggaggctgaggcaggagaatggcgtgaacccgggaagcggagcttgcagtgagccgagattgtgccactgcagtccgcagtccggcctgggcgacagagcaagactccgtctcaaaaaaaaaaaaaaaaaaaaaaaaaaaaaaaaaatttcactctgatatctataatcccaatgcctttgtacattatattgttctctcacaacacctagctcttactcatccttcagactctggaaattttccctgatctctctgcagaccacattatgtgcccttatcatttttttccttcctccctcccttctttccttctttctctcctttattttttcctttctttctgcatttcctttatgtacacttatcacattatatggcagttatttgttttatattcttttctagtagactatgagcttctaacacaaggaactgcacctatcctgttcaatttataccactgcaatgttgagatgtttgttgaatgaatggattaattaatgaacaaataaaggaatggacatataaccatctttgcctgtttgtgtttcgccctgagatgagcatgtgagtgacaggatttctgggaattagtggtgttttctctgatgtaatagaagagcagacccaaggctcagaatggcacgttttattctgtgacttgtacttgccaacaataggaaccattataattttactggatttctgagaatcagcaacatatgtgtgtagtaaaaataatgacaacaaaagcaaatagcctgatgaaaagagtccttagcatgcaggagtcttcccactctgatttacccttgtggtcaggtcacgcttccaaactaactcattgttgcctcaaaacattcatcttaagtagtatggatacaatgcaagaacaaatctgaatttcttcaaagtaaaaatgttgatcaaggaataaaaaaatggcaaacaaagagacttgaaacattgtgatggaagaatcatactgtatcaaggtgggaggggaagttatttttaaggaataattgagggtggtagagacttgggaaagaaaaaaaaaagccaggatttcacatgggagtgcagacaaattataatttactaagagaagttcaaactgctgacagtattgtcacaacaaaagtgagtgattgccatatgcacagaacttaccggaagaagtgtagcaagccccttgatacaaagtatgcatatgaggacaagtaatccttttggacagggaacatggtgtcttccattttctgaagggatgcagggaccacagggaagaaagtgcagaggcttcactgtcccagacctgaactacagaaccaagcaggtgctggccactaagcagacataagaatgtgaactgagaactgagaagacatataaataaatgtttcctaattttttgtttgttttgttatgaaagcaaaaagggcactgcagaaatgataagggacagatgatttttaaacatctagtctcgttataaaatcttgtcacaccacaatcacaatgactgtgggactgggagaaacttgtcatttgccatctttaactgaaagcgatccaatagtcccatagacagttcttatggataaacatagaaattaacccttctggtcttaaagcttgaaacttacatttgttatttcttttttcctttttttttttttttttgagatggagtcttgctgtgtttcccaggctggagtgcactggcatgatctcggttcacacaacctctgcctcctgggtttaagtgattcttctgcttcagcctcccgagtagctgggagtacaggcgcatgccaccatgcccggctaatttttgtatctttagtagagacggggtgtcaccaaattggccaggctggtctcaaactcctgacctcgtaatccgcccgcctcaggctcccaaagtactgggattacagatgtgagccaccacgcctggcctacatttgttatttctgagttcctcaggagaggacctccagtcttctcagaaggtatcaaataactgaaactcaccagatcacagcatccagacaatgagacgtcaggcccttcattcattatgattgcttccttacccctcctgactttgttttctcatacattattacattttttccttgctatataaacccctaattttagtccctcaggtagatggatttaagactgatttcccatctcctcagctgcagcacccgattaaagccttcttccttggcaatactcactgtctcagtgattgactttctgtgctgtgagcaacagaatctagactgaacccctggtgtttcggtaacatattccatcttctaatgctatttcttctatatgccttaatggttacatgtttcttgtacagtagagaaacttctatggtgtatatcaccacttaacttcttattttttcagctaaattaaccagaatgcttgtgaatgcagtgcactgatttaattttctgcacacttatgagatagtagcacacagcccataggaagcacttaattgatgtttgttaaatgaatggatgagtaacttatgtgaaagcacattctctggctcaagtagttcaagttacttccaaatataggcagaatttgaggatataggcaatgaagagaaaagcccatggattttggatgtaaacaatttagtttgaacatgggtctgacatttactggctatattaccttgggcaagagttaattctctaagtctcagtcttttcatctataaaatgtgtataataatatccttatgggaagattgaatatacaatttatatgaaccatttagcacaatgattggcatatagcaaggacttaatattatttccgtttttcttcactttagttaactcaggattgtcaaaaccacttgagatttggctctttgaaaatagtcttgaatagactggaagtaatatggaaaattgttaacatatgttaattccaggtggtagtaatagtaccatgattatatatatttgtgcttttctatgtctttaacagttctaaaaattaaacacataaaaaacaaagcattaaataaaatgacagatattattaaataaaacatcaaaaataaattgattcctacctttataaatatagaatagggaattgagtcattcagttgagttacatttgttgagtaactactataaacaagactgatgtggagcttacagttcagtggggaatacagatttttttttttttttttttttttttgagacggagtctcgctctgtcgcccaggctggagtgcagtggcgcgatctcggctcactgcaagctccgcctcccgggttcacgccattctcctgcctcagcctcccgagtagctgggactacaggcgcccgctaccacgcccggctaattttttgtatttttagtagagacggggtttcaccgtgttagccaggatggtctcgatctcctgacctcgtgatccgcccgcctcggcctcccaaagtgctgggattacaggcgtgagccaccgcgcccggccagattttttttttaaaacatgtgatcagagcaattgaaaggaaatacaaggttgtaacagcacattatgcggcacattttacctggatttaggagattcggaaaagctaagaggaattaatgatgtgtaggagtaagtgatgtataaactggcaggcagagaatgaacaggagtgagggatggaggcggggagtgtcccatggacaagaaaaagcacatactagagactacagggaatggagaatgaagaatagttcaatatggatggagcatagggttcaagatagaaggtgggggacagacaaggcttgcgaagagggcaggggtctgatcatgaaaggccatgaagctttgtacctcctggggagagttcatccacaaaaacatgacccccatctgtcactgttagcgaggtctccattttttgtactaatgttgtggtgcttaggaagcaataattcagtgcttgaagtctgatggaatgctgtggtttctggggagcccagaatcatggtgctgctatttttaatggacagaaacttactgtatttcaagtgaataaaatgagcatagaggttttgtctcctacacattttcaacctaaggacttttatagatggatcgaagctgtcctgagccaaagtgtatcagttctgcctaccatcagcagaagatattagcagtggtttgtttaatttctttttggactttcagagaaacagacttgaagatagcctttgggaagctaacttgtaagtacataagctttgtaatacaaagttaactttatcttaattttcgtatactgctgacattttcttgcatcagatggattatgtttgtgtcccggatcttgaggttagccagagtttgtaaaactaataaataattttacaatctggaagatttttcttttaacaaaaccaatggcatgtgtccattatcctatggagctaggacaacttgagtttggtttggagaatctagaacacagttgctctggggcagggatgaaggaggattacattctaatgacagtcatttgcaatgtctcatcgtgttcaaacataggacgattacacaaggtttcataatggaaaataagcggtccagataattcagaatacacaaaccatttggtgaccttgcctgtgactcctcagggagggagctcataggaaaactgatgatctgagattgtgatttgcccaaagttgcagaataacattatactctaattcccaactgttgctctatggacttggtttttacaattatctaagattttcaaagactctaagctttgcaaactctaattacatgacaaagttcctggccattagcttttaattttagagtatactttttattgtcgtttgagttttatgtactttttattgtcatttgaattctgcatgatgatagtcttcctttccttcactccctaccctgatcttcctttctccccaaccctattgatactgagaaaattaacatctcatttggaagtgggatgtttgaagggatagattatctttacagtttgtttcatgtgtccaagaaaatttttaagctgcagctcggggtagcatttttctttcctccagctctgtatttttttcttatttaatgtgatcagtagttcaaagcaggatctatttatttttggctcactttccacctcactggttgtgacttttagatgtgtatgtggattttgttctcacaggaagatctaaggagaccctgttataagcatgggttaaccgccataaggcacagctggtgcaaatcagcatgatgcagcatagcttagggttattggcagcgcttgtgtttagaattatacagtaaagaagaaaaggggctctgtactataggataggaaagaaggaaaaatctagcgggggagaagggaggatatcaaacataaacaggagagggaagacataaaagagtaggggttttcctagtgacctcataaacaagtagtatggggaaaactgtatactatgtaaagttttactaaataaaatgatgtttatatataatcctttatggtttcagggatttgggacaccttattttatatgatatgtttctgtcctttatgggggtaaacagagaaactgtggggaggcttgatagcccatggagaactgggagggttctttaaagaagttggggagaatggaaaatctaggatgggaaaaagggtctggattctatattccaaattctctgtcctcagtctgatttgatgtatgtcatctatggttcagctacatgtctcaggttttggatcaaaatatacatggtcagcataagtctctctgagcagattgacatattttcccagatcattacaaaagagggctcatcctttagggaattgtctgcatctttcctgaggcctggattcagtgctcctttgaagacaaatgggccgtgataggtggagcagtttctgtaagagatggtcctgtgccaaccccctggcagaattgtacacctggcactggtacaactggtgctccgcttagacttttctctcagtctttcatggacacctattaggtggctgggaggaagaaagaaggggaaacttcctcctcccctggaggacagactgctatcagtaaggaagctgtgtagctgttcattagaagtggtgattcttatttggagcattgcaaaatttcaaaattttcccttccttccttccttccttccttccttccttccttccttccttccttccttccttccttccttccttccctccctcccaccttccttcctcttctttctttcttatagtcttgctttgtcgtccaggctggaatgcaatgtcacccaggctggatcttggctcactgcaacctctgcctcctgggttcaagaaattctcctgcctcagcctccttagtagctgggatttcaggcatgtgccacctcgcccagctaatttttgtatatttagtaaagatgaagtttcaccgtgttggccaggctggtcttgaactcctgacctcaagtgatctacccacctcagcctcccaaagttgctgggattacaggcatgagccaccgtgcctggccaaaatttctttttattatcttgagatcaagacgtgctcaggtttcacgatgagtgtgtaagatgactctcgatgctaattctaggacagtgtgtgaggtagcccccacagttaattctgggtcaaggtgagtgtgtgagatagccccaaagtttgctctaggtctgggtttgtggattgtgttggaaactttaaaaaacaaggacttgtgtagaagtttgaggaaagatagtttgtaaatttgtatctttttttttttgaatgataggaaagcatcagtgttgagttctgcaagccaattgaaaacagaaggtattttatgcatagtgtgtgggtgaagaatgtatttgtgaaggaggaaatgggtcaattgaaataactatcaattcataaaagagaaaatcagtatctaattagcatgaagaatgctcagatcaaatagtgtctaaaatgttgattcagtttagttttatataaaatacttagtgagatataaaggatatagaatttgataaaactcaccttgattccagtttcctccctgggagaatacctgtgaatgggtgcaacattcttaatgtgctgggtgacttgattttttgcaaataattattttggtggaaatgtgggttcataatgtttctaatatgctttgcgtcatttttcaggagcatgataaatttgaactgttacatctattttactttggagcagtcctccttgtcgtcaagggcatccatttttgaaacagctgtttggattgagggatacaggatgtggccataaagtagatcaaagttaattggccctcagggtaaacaagctcatgaccttggcctcattagccctgtgctgtaactagctgaagtaacctgccctgggcaggaagtttgcttccctgaagaagcttcagcatttagaaattatccaataagtcttctcattttgccaacctgccctcttctgccccagcactgaatgcttggatggtgagtgagaagagggggagattcagtgctttatgggattaccatcaggtaggaaaaaaaatgttaaagtcatgcttattttataggatttgtatacaggcttgaggataggttttggccaatagaaagcctctacatgtgtcacaacaaaaggtgtatgataggtgatactttcagcgcggtggactcttttgagtctcagttttgccttacctcttcatactgtctggataaataatgaaatatgccacaatagccctgaccatgaaatggattaatgaagctgcagttcaagactgtacacaagagtaaaagacatttttcctttcccaggcccaagaaaacaaaggagtcatgctgttccgtggcaatggagccaccagcagctcctgaaggccagttctctgcagctggtttatattcctcacacttcagggcctattgctaagtaggtttgtcaacatttcctccaagcacctcttttctagcctttccattggccagagggatggggcagggataagagtgatccttccgactttatggatagctaggacattttggttcttcatactctcaggcatggactagttcctcttatcaaaatctcttttctgaagtaaaataagtagaaaaaaatcaaattcaattgaaaacccagatgaagcaattattactcttcttttttccacttccttctccttcctaacacacacagtaaacatttttttggagagatcaatttcttctatgtagactggaatacttcccccttaccttagctggctgaaagtattatggattgctctgctaagaactctctttttcttccctctttggccacatacccagttgctattgaaaacactaacttagaaacccattaaaatagttatggaatatttattaagttttttaatactgtggagtataagaaacctaaactaggccccggtttttctcccaaatgccactccactctgttaagctatttctccaccccatctgatccatttactgaaagttaaccactgttaaccatttctcgagattctttacagaagaaaaaaatcatgcatgtacctgaatgtatatatgtacccatctctacatatatgtgtgtgttttaacatataaggtatcatagtgtacatgtcattctatacctggcatttttcctttaatgatgtgtcttagaaatcttttcatgttggcacacacagatccatctcattctaactacacagtaatccattacatggatgtgccattttcatttaacagtctctatactgatggacatattgatgtatttttaaaaccacaacaaattgtgctctaaaaaggttatgcccatttgcactctcaagagtataaaaatccattttgaatagatagaaaaataatattttcccagactcatgtagctggtttctgattttattcctaaagtgttttctgtgttctagtttatgaacacctgatacataaataagtgatgttcctatctagctcttaagctaatcaatagaataaatcttctttcacaccttacaagttaatgttcaccctgtgcttggccagaaaaggatgtgggttctatgaggattgtccaccgatggcactctgtccccagatacctgccacaaagataccagggctccaattccagaaaacatagcccaggaaacaggactttactattccatctccacccagacacgtggtattttgagaggttattgccaactctgctgcctttacacagacccatcaaatttgtgaggcaagatagaatcttttttgctacttctaaaggaaactcagtgcgttcatcagggaaatggagctcattacatggacagggaagctgggaggaataaccacttaaaagcactttgaagcgtgttcaatcacagttaaatgcttcttcataaaacttgatttttgaggtctgtttggcatcatagaacttgcaactattgtgtcttcataactcatggcctgggatttggcactacatatttttatggctgaacaggaatagtataatacacatgagagctactcagatatctaatattacagaataatgcagaagacagaatagatattgtggtgggtggattataattattttatttttgttggtaatgtgctctaggtaccatgcagggatttggtgagattgctgtcatattttctaaagtatctggaattcctaagaggaaagctggaaaatgagtgcaaagtaatgatgcacagtctccttaactctcctagtgccatgggggtgtagacaatggcaaaatgagagggtagtcagacgtccatgtgtagatctcactgctttacagggaacaagaggctgagtattgtactggatgcaagaatcaactttgcccaccttaatcataaacagaaatatctagttctccggcctgaaccttttccactggtactgaatttctaaagataactgaatttctaaaagataaccgggggagggtagagctgcattcccaggatccttgagtttcctatcaatgaggaaagctgctgcttatttgtggacccagtgggtgccaaaaggaagaactgaagggatttctactgggttactgaatttattccagctccgttttggggaactctcaaaccttggggtgaggagtgggggttcccagatgaattcaacaagagagagagggagggggagatgggaagagataagttcaaatagacaggcaaagggaagaaaataaggaacacacacacatacatatatataatgatacttagattggcacaaaagtaactgtggttttgcattgaaagtatagcaaaaaccacaattacttttgcaccaatccaatattattacctaaggactcacagagatttccttaagtccatagggacaggagcccttgccctccatgcttcaggaatgatttgattaaggatactaaacaggcatgtgacaatgtgagcttgctcaataataatccttgatggactattactcattttgtgaaattgagccaagtctctctttcctgctccccctttctccttatttccctttcccccagctactttgctttgctaagtaatcagacatggatcttattcccaagatatttatattcttagggaaataagacatttaaaataaggaagaatgcaataaaatctataatggaaacccagctaatgagccacaggagttcagaggagggagatgtaaccagttggagtggggaggagattatggattgtcatatttttgaatttaatatttattgtgaatgcctaagttaaataggaatggaatgggaaaaagacttttccagggtgtggagttgtcaggaataaatcagggaggtctgcagtcttggggcatgaatagcatacaatgatgagattattctgagtggagtgaagggtacacaagcatattaaggaagaagtttcaatggtgtggtggggctctaatctgcagggccttgaatgttcattgtcatagctacagataattgttagaaatagcctggtttgctgcaaaagacagggcaaactgggagggaccagatctgccctcgaggattgatcaggaactgtgaggaagtctaggctggcagacaaggcattagaagagatgtgcagaagaatatggcgatagatgacaagcggtcacccagacaagttggtactgagaggtaggagacaagtctcaaggagggaaggtgcctgatactgggaaatacaggaacaggtggcacttagaagtgtaatcaagactgagggaataagaaagtctgtcagcagttagcaggctccagccgctatgctcaggttcatgggcagacttccaagctctgggaggaaacagcagaatggaaagcaagaagctgggccccagccccagagggaccaggcagatttccaagccaggagtcagacctggaacatgggcctgactagcagtaagaatggttcaatactccattccagagtgctgagccaaagtcttttaatgccttctgcttaaggttatgactgaccttcgacgctgggtttacaggtgggagcagagcggtccagctgtttggaggggaggatgcagatactggagaaacagtcagggttcactgctggctaaagagtctaggccttatttagtaggcaaaaggagaacaatggaaaaattaaaacagaggaatatcttaattggagctgtatttcaggaagatcaatttgatcctagtgtgtaaaaggaaccagagttaagtgagtcctcacctgtaacaaatttcggccattctccttcctaagcacttctccagtgtgttcacttctctgcaggcccccttctaatactgtggcataaactatatgagtaaaattcatacaattaataaactaataaaacattaatttcacgtgtttcttttcattcttttcatgtggcttctggaaaaagttaaaatttataagcggctcacattatttttcagtggggcagtgctgctctaatcctttctccatattgcggttagaactttttaaaatgcaagtcttctcatgtagctctactgcatgaaatctccccataatctccattgccccaggataaagtctaaattccttagcatggcccccaccctctttgtcatctggccttagcccatctcccattgcactaatccttcaggtgtatcaaactattttcggtccacccgtgaaattactttgtattctttggcatccatgcctttgctcctgccattccttcgcttgaactgaatatttctcccctttttcatgtgttaacttttgcctcctattaaggtctcagctgtaggcatacctgactccttgactgtggattaggtgcttctccttgatgctaagggccacatcctgtgcctgctctactatagcatttctcgcattatttttgaggtcctattatctttatcctctacctagactgtatgttctttgaaaataggaactctgtattgatccttatgtcatgtccagcacccagcacagtacctggagcataatagctgcttgcatgattgtatgaatgaatgaatggggcagatgtgctaggtgaaatgaacctgaaccagcatagtggcattgggaatgaaaaggataagacactcatcaagaacgtaatttgtgagtgctggcaaccatgtaaattgacctctaattactggttgggtatcctttattcaaaatgcttttggccaggtacagtggcttacacctgtaatcctaacactttgggaggataaggctagaggatctctggaggccaggagtttgagaccagcctgggcaacatagtgtgaccccatctctacagaaaacttagctggggatggtggtgtgtgcctgtagacacagctacttgggaggttaaggcaggaggatcgcttgagcccaggagtttgatgctgcagcgagctgtgattgcactactctactccagcctgggcaacagagccagaccctttcaatcaatcaatcaatcaatgaaacaaaatatggaaaatgcttttgtctaggcacagtggctcacacctgtaatcccagcactttgagaggccaaggcaggaggattacttgagcccagaagtttgagaccagcctgggcaacatagcaagatcccatctctaaaaaaatattttaaaaattaactgagcatcgggatgtatgcctgtaattctagttattcaggagactgaggtgggaaggtcttttgagtccaggaatttgaggatacagtgaactatgccactgaactccaacctgggtgacagactaaaatcctgtctctaaacaaacaaacaacacacaaaaaaactgcttgagaccagaaatgtttcagatttcagatttttaaaatattttggaatatttgcattataccagttgaacatccctaatcctaaaatctgaaatctaaaatgttccaatgagcattccctttgagtgtcacattggcactcaaaaagtttcagattttgtagcaatttgggtgccagaatagggatgctcaatctctactaatgagtatgaagaactaatgcaattcataaaatgccctaagtcctaaataatattaaaaatagcaatgatgtggacaaatgttctaaggaaaaaagaaacattctttttaaagtattctgatacttggagtcaaaagacaggtttaagactttggtccagcatttatgttgtctgtagtcttgatatttcagttttttaggtcataaaatggagacagtaatacctctacatttggggctcattgtgagtattaggggaatatatgtagaagcatcttgcaaattgaaaagtgacagaaaacactagttattgccaatacaaaaatatttatacctgcaagtaggtgataaacatgctgtagtgattaaattgtacataatcgggacctgctcaaataatgtaaatctcaaacaaaccatcctagcacagaggaacgtggacaatttacactttgtcacatgacattccatcaatacaactcatggaatgagctaatgagagagtgagcaagaggtggcttgattgggcgccctccttcccagtgcccggtctgtgatggcctcacatttgacctctaactgtggctcacactattcactctgcttgcattgctctcttcttcactcctgcattgcttcactaaaccccagccctaccaccttaaaactctactcacattttaagtctccttcaggatgccttaatggggtacgagttctttgtctgaaggctcacagcattcagtacttctaaagttgtcttttttcctctctcaagagagatcccaatatcgtcttctcttccatttcctggtcaaggatagcactaacacctaagtatttccaaggtgggaattgaaagaggcctttccatccagcctgtattcctgtccccagacatgtgccagacctgtgctaggatggctgaattaaatggaacaaatgataacattagcatttgaatttggaatttagggtcaggatggttccatagaagctgctatagtttggatgtttgtcccctccaaacttcatgttgaaatttgatccctagtgttggaggtgaggcttaacagggggtgtttgggtcatgggggcagatctcttgtgaatggcttagtgtcatccttgctgtagtgagtgagttcttgctttattagttcccacaagagctgattgttaaaaaaaacaaaaacaaaaaaaaaagagcctggcacctccccgctgtctctcttgcttcctctctcaccacgtgatctcttacagctccccttcaccttccactatgagtggaagtagcctgaagccctcagcagatgcagatgctggtggtgcatctgcagagccatgagtcaaataagccttttcttcataaattacccagtctcaggtattcctttatagcaacacaaaatggactaggaaagaagcccacactcacttgcttcccttttacctgcttactttgttcattcccttgtttgtctcctgtactagtcagggttcactacagatacagaaataataggaatatatttaattgggaattggcttacatgatcatggaggctgagaagtcacatatctgctgtctgcaaccagcagcgaaattcagtctaagggcctgtgaatcaggagagccaatgatgtaaatcccagtccaagcacattaaaagatgagatgagatgtcccagctcaagcagtgaggcagggaaaaatgggacaaattcctccctcctctcttctgttctattcagtctctcaatggattagatgatatccacttccattggggagagcaatctattttacagaatttactgattcaaatgctgacctaaatccagagacatacctagaaacaatgcttaatctggacactcattggctcagtcaagttgacacataaaattaaccatcacacctcccttactttagatccaggagcagtatgtatcatttagtactttatgcacagtacatgttctgttgaggtcactaaaatagttatttatttacctggcccttgacagaggattatttgaaggattatgggattacataaaataaaacaaaaacaagggacatacacacagtatattatactattaaaacaaattagtgctcaagaagagaagatgtagtgctattcttatttaggaaaaatatacagtattagcctatttgacatgtgtgtgaactaggggggcacgtccaggattctttttaatctgtgctccctctaactctccaattctgtcttctctgcctagattgctctcttcccctacccaccccttccactacaacttctgattaattctgcctcatcttttggatgtcacctaagagattgttttctttgggaagtctttcttgaattctatgggcttagcctgtatactgtaataggaggttttctctcaacatttatcatatggtagtgtaagtgctttgtctgtttctccctctaatccattagcaccatgaggcaggtaccatgtctgtcatgtagaaagttagttctaccagctgggcatggtggctcatgcctataatcccagcactttgggaggccgaggcgggtggatcacctgagatcaggagttcgagagcagcctggccaacatagtgaaatcctgtctctactaaaaatacaaaaaaaaaagttagctgggcatggtggcaggtgcctgtaatcccagctacttgggaggctaaggcaggagaattgctcgaacccgggaggtggaggttgtagtgagccgagattgtgccattgcactccagcctgggcaacgagtgaaactctgtctcaaaaaacaaaaaacaaaaaaacaaaaaacaataacaaaaacaaaaaggaagctctaccatgtgtagcacagtgtctggtatatagtggtcacaaaataaatattcattacataataagtaggcaaaagccagagcaatttggaatcagagtatatcagagtaagtcttagtatattattataagcaaggctttggctaaatggctcctttacctctactgatttctgctctatttaaccaggtatattaattggaatataggtttggctgcttgtcacagatctatgccagtttaaacaagaaggaattttctttgtcacaaaacaatccagagataggcagtcatggacaggtatggcagctttgttctttaggatattaggttggtcaaatgtaattgtggtttttgccattaaaagtgatagcaaaaaccgcaattacatttgcaccaacctaatagtcagaagcaggcttttacttattttttttttgagacggagtctcactcttgcccaggctggagtgcagtggcatgatcttggctcactgcagcctccacctcccgggttcaagcgattctcctgcctcagcctcccgagtagctgggattacaggcacccgccaccacacccagctaattttttttttaattttttggtagaggtggggtttcaccatgttggtcatagctggtctcgaactcctgacatcaagtgatgcacctgcctcagcctcccaaagtgttgggattagaggcgtgagccactgtgcctgggctccaggctttttctatcttgatgctccaatatcctatgatgatgccctcattcccatggttcacagccatgacacaatcccagtaggtccacttttgtcctggaatccttggaacctacacccaaagccagtttaatttcttttgggtacctgaactgatttgaggaccttctggaccatgtaaggcagcttgagtctggtatggatttatagaattaatcaagttgaacaatttctcactgcttgtctaatccatgccttaccctcaagccttctcaagtgggaaagactaataacttagccttagttgggtatgtatgacaagaatgccagctggttcttatgccaaggtcaagcagccttcaaacagggtggtatggtttcctgaggcacaggatacaataagttaacagaagggcattctaacaagttataaaagagaaattgcttggaacaatgttaactatattatctagttagctatcaggaaaagtatagtacttatttggctataaggttgccacaaaataccattgcaccattatttctttacaatgcctttctgttgggtttatgttattctggaaataagtcattaattcttattacagaagtttgaaatgaaggccagcccactctatcagttctcccctcccacgatatatacacacatagcacagatagcacatgtatgtgtacacacacacacacacacacacacaatctctggagggaaggagagaagagagaggaaaatgggagaagaatcagggtaggggtgagagctgggtgcagctttctagagcattagctattcactcatctagaagacgctgaataaacaaaagtaactactccttcccttccccctccccaaactaaacattttcattctgtagacctcactttgtgtcctagacaaaacaggatcagtgtgggtcattatgagatgattctgccagtttaataggaaaataacaaaaagcaaagatctgtctaaatttgttcttggcaaaggcaacatatgagatattatctgatttttaaaaagacgttatctaattgatatacaatccacagttgattttctaaagtggtaaaattcacttttctttgtgttttggtgtgtctctgtgtgagtagttatatttgtagaattttggttaatttttgttacaattatatttccattatatatgtttttcttttctttccaccttctcaaaagttctcctttaaagcagaaactttccattcttggtttcatccaaaagacaaatatttctgggaaaacactgtgtttaagctattcagcaattctagtgttatgtaactgaccacactaagacttccaattaactttggttgtgttttattgaagagtgtcatagaacagaataactggtgataattttttaaaacttttctatgtttttaaacagggaaagctctcttaaaatatatgcagcatcttttgataagtgtggaaggtaaatctcctgtctgaagtattctaaagtccattgactgtattccaagactgatgctaatctgtctgacattgaggcattaattttcataactcaagttcttcttgctcttctttccctcttgctcgtttccctgattatttttgtttttccttcttcaatgatgagtgcatcttgagactctttttagactgcttctcttcaaaataagaatcatgtgaattcatggtttcaaataatttcccatgtatatgtatgtactaacttagaagtcgctttcttcatttttaatctttatctctcctttctaccactcttcaatatatccaatttctttatccccagaactgagctgatattttttccaaaagcctcataccttcccattttctctttatttttatgtcctcaccacaatcccagtggtctagtcttaaaaccttgcagttttgtggggttttttttttgtttgttttgctttactctgtcatttacttgcaacatgctgcctattatcaagttgtgatgtttatttttcctaaatatcactcggattcatttctttatttcaaaaccctgatattgcctcactcagcctaggtgataattatttggtgtgtacattactgtaatatcctcttttatgtcctttttctactctaagctaacctatggataagtatgagaatcgtcttgttcacagatgaggatactaattttcaccacttttattcaacgtagtagtggaagtcccagccagaacaatcaggcaaaagaaagaaataaaaggaaccaaactggaaaagaggaagtcagattctccctctttgcagacaacatgatcttatatatacataaaccaaaaaagaattcttagaactgataagagaattcagtaaagtttcaggatacaaaatcaacatacaaaaatcagttgtatctctatatgctaataataaactagctgaaaaagaaataaagcaaccccatttatgatagctacaaaaaatacctaggaataaatttactgaaggaggtgaaagatctctgcaatgaaaattacaaaacactgatgacagaaattgaagagaacacaaacaaaggaaagacattccatgctcatgtattggaagaattaatattgttaaaataataatactacccaaagcaatttatagattcaatgtaatccctaccaaaataccaatttttcttccaagaaatagaaaaaacagtcctaaaatttgtatgtaacaacaaaagagccagaatagccaaagcaaaaagaacaaagctggaggcctcacactacctgactttgaaatatactacaaacctatagtaaccaaaacagtatggtattggtttaaaaacagacatatacaccaatggaacagaatagagaaatcagaaataaatccttgtccctacagccaactggcttttgacaaaagcacaaagaacatacaatggggaaaggatacgctcttcagtaatgtgctgtgaaaactggatgttcatatgcagaagaatgaaaccagaccccatctctcaccatgtataaaaatcaacttcaaatggattaaagacttaaacataattcctaagactataaaactactagaaatgctttaggacattagtctgggcaaagattttatggctaagacttcaaaagcacaggcaacagaaacaaaaatagataagtgggactatattaaactaaaaacctctgtacagcaaagaaaacaatccacagagtgaagagacaacctgtagaatatgagaaagtatttgcaaactattcaactgacaagggactaatatccagaatatataaggaactcaaagaactcaacaggaaaaaacaaaacaaaacaatcccattgaaaagtgggcaaaggctctgaacagacatttctcaaaaaaagacatacaatttgccaacaggtatatgaaaaaaaaatgctcaacatcactaatcatcagggaaagacaaaaaagaatgactattatcaaaaagacaaaaaataataaatgctggtgaggatgcagaggaaaagaaactctaatacagtgtaatggaagtgtaaattaggataaccattatggaaaacagcatggagtttgtaaaaaaaacaactaaagaaagaattaccatgcgatccagcaatgtcactactgggtatttatccaaaggaaaggaaatcagtatatcaaaggaaattagtatatcgaagggctacctggacctccatgtatatttcagcactattcataatagccacgatatagaatcaacctaagtgtacatcagtggatgaatgggtaaagaaaatgtggacacacacacacacacacacacacacacacacacacacgaatactattcagccataaaaaaatgaaattctgttatttgcagcaatgtggatggaactagaggtcagtatgttaagtgaaatgagccaggcacagaaagacaaatattgcatgttctcactcatgtgggagctaaaaaaaagttaatctcatggaaaagaatagaatgatgtttaccagagaggctggaaaaggtggagagggggatgaagaagaggttgcttaataggtgcaaaggtacagttggaaggattaagttttagtgtttgataacacagtaaggtgactatagttaacagtaatttattatatatttcaaaatagctaaaagattatttgaaatgttcccaacacaaataaatgttaaatgtttgaaatgatggatatcctaattaccctgatttgctcactgcacattgtatgcatttatcaaactatcacatgtacctcacaaacatgtatcaataaaaaagtcctcttgttcacactgttcatttatcttttaagaaaattttttaaaaatctgccaactggctactttattcccacctcatttacctgaactatatggtccacttctccaaacaaatatcatctctttccatctcctttcaacatgccatttggaagactcctctttcttcctccccaaacatatttctctatttcttcaaaggtggtggttaacacagccttaataaaagctgaaattacctggtcctttaagagcgagtaccacctgactcattttctcagtgtctcagggctacattgttagtctgccctgctctctttatctgtacttgctgatgtgtggctttgtaacatcatgtagtcattttctttatgccttttctctgcttttagagtacaagcaactttaaggtagagacaatatctaagatttatttatatcattcaactataattactaagtacttgctgattttgtttttttgagacagggtcttgctgcattgcccaggctggtgttgaattcctgggctcaagtgatcctcctgcctcagcctccctaagtgctgggattacaggcatgagccaccatgtccagccacacttactgagtttatagcatggtatctatctatatcaaattatttattgagcatctgctatgtgctaggcacagtgtgaggtgctagaaatacagtgatgagaaaaaactgacattacccatgctttgatagagttaacagtctaatgggagaaacgggagaaacagacatttatcaaataatcatacaattaagtgtaaaattacaactgtgatagagctacaaagagaggaatatggtactatgagagcacataataggggtatttaactgaggtgggagaggagaacagggaaggatgtcccaaagatggagaaccacatgagcaaaggctgtgtgaagggagggagccagatatgttcaagacattgaaagaagactggggtggctggagcccagagagcataggtagattagaggaaggaagctgaagaggcaggcaggggctaacctgggcaaggccctgtggcatatgaaaaggctttaggcttttatactgagcaatgaggagccactggagggatttaagaacaggaaaggatagtatggggttttgagaagatcactgtggtcactgtgtggaggataaattaaagtgggcaggaaaatcaagcttggtgtttttctatgttgtgtagcgactcagtaaatgttgctcattgactgaacagtttgtggggcttatagttcttgctgtaatctctatattatgacgtttggcttcaagctaaaaaatcttgagctactcaaaatatgggtctaatttttaacatagtctcctaagcatttgcaattcattgacctaacatgtagtagtaacagataataacaatgatgatgatagacaacattatctagtatctagagtttagtatctagtgtctagataatagaaaacattatgtatgctcctgagcactgtgctaaaggcatgatgtcaattatcttaattaattcctactataagccaatgaggaaggtgtttgtattcctatttttttttttttttttttgagatggagtctcgctctgtcaccaggctggagtgcagtggcgcgatctcggctcactgcaacctctgcctcctgggttcaagcaattctcctgccccagcttcccgagtagctgggatacaggcacatgccaccacacccagctaatttttgtatttttagtagagacaggttttcaccatgttggccaggatggtctgaatcttttgaccttgtgatccacctgcctccgcctcccaaagtgctgggattacaggcgtgagcctctgtgcccggcctgtatccctattttcttagaaatacgttgtgcacgtgtaccctagaacttaaaatataattaaaaaaagaagaaataggcttagaggtgttaaagaccttgcctcagagagaagtggtgggactaggactcaaatctagttgtctctaactgcagagccttcactcttagctactttgttatagaagttctagtttatcttggttttcagtaccatttcaataccactattatgaaaaaggagattccttcagtcccacaaagagatatgatttagctaattgcccagtaactccttcctcaattttggtcaaagcctccatggcatcagctcacccagctcccattctgcagatgttttattacatgtcacacaacctggcattatttctgagttgatggttgtatgttttgatcttttcaaacatgtggacaaatttctggctggctgtccttttttcttttacagaaatatataattagatgaggtaataatgctcattagcccaagttacaaatagtatttcagtatccaacttcctccttaggagagcatcatcactgattaagaataattgccaacaattggccgggcgcggtggctcacacatgtaatcctagcactttgggaggccaaggtgggtggatcactggaggtcaggagtttgagaccagcctggccaacatggcgaaaccccgtctctataaaaaatacaaaattagccgggcgtggtggtgggcacatgtgatcccagctacttgggaagctgcggcaggagaatcgcttgaacccaggagccggcagttgcagtgagctgggatggcgccacggcactccagcctgggtgagagagcaagactccatctcaaaaaaaaattattgccaacaattggtaaactattagttgaaaaatgtttgccatcatggccggaggagctctctgcctttggcctaccatctgctaagtgctatttgcttgtttcttctgtcttcattttctataccctagggcagcctcttctttagttgtaatacgtctgcctaaagtgggcttgtaatttgcttgcctaaatataaaaacgtaataacagagcattgagaatttttcactcataccttatagtatttctgtgataactaataaaatcagcttggtccctcagaaaatggaagcaacggcttactggttaaggagttttcagaggactggtcatctttaaccaaacatgactggctctttaccctttgcaaaggaaggttgaaagttcaagcaaaaagcaggtgaaaccacagttatcatagctaggaacaaccatagcagaatgcccaactgatagtggaaagctgaagatggaaagttgattggtaagcaacacaggctgcaaacctaaagaatagggagaagcatttcatagggatattggaagaaataaatagctttcatattgttggaggaaggaatcaagaaataccagatttatttgcttatgtcctccaaaaggttttatggatctataatctttattatagtttatgagtaaattattgcaaaagggcaattatcagttttgttcaaaagtccactaccagtgagtgggagaagtttcacattagtctgcttaggtagtggttataggtaagtagaggcaatttgtgctcagtagtactaaggtgtggaatggaaatcctgccctctcacttatttatttttcttcgcatggtattattattattattgccctctcaggactgctttcttctaaacttttgactgggcataggacattatagtgcagcattcagtttgaggatgacaaagccaaggccttctcatttcttaccattttatgttgatattgccatcttcaaggcaagtttttttaaaaaacaactttattgaggtatgactgagatgcagaatgctgtacatatctaatgtatacaacttgatgagtttggggataagtatattcccatgaaaccatcaccaccatcaaagccacagatatatcatcacctcccaaagcttcctccttcctcctttattattattattagtatattcttattattttgtgtgtgtatgtgaagatcacttaacataagatctaccctctcagaaaattttaagtatataatagagtattggtagctattaggcactgtgttatagacctgtagtagatccctagaaggtattcatcttgtataattgaaacttggcaccctttgaccatcaccaccacatttctcccaccccctcaccctgccaatcaccatgctactctgcttctatgagttcgactattttagattccacatgtgagaccatacagtatttgtctttctgtatttggtttatttcacttagtatgtatttcaggtccatttatgtagccacagatggcaggatttccttttttttttttttttttttttgacggagtcttgctctgtcgcccaggctgagtcttgctctgtcgcccaggctggagtgcagtggcaccatctcagctcactgcaagctccgcctcccgggtttgccattctcctgcctcagcctcccaagtagctggaattacaggcgcccgccaccatgcctggctaattttttgtatttttactacaggcagggtttcaccgtgttagccaggatggtctcgatctcccaacctcgtgatctgcctgcctcggcctcccaaagtgctgggattacaggcatgagccaccatgcctggcctccttttttaaggttgaataataattgtatctgcaatattttgactattgtgaataatgctgcaattaatatgggagcgcaggtatctctttgagatactgatttaaattcttttggataaatacccagaactaggattgctggatcatatggtagttctatttttaattttttaggaatcaccatactgttttccatagtggctgtaccaatttactttcccaacaatagcatatcagggttcctttttgtctgcatcctcaccaacacttgtttgttttttgataatggccatccccacaggtatgtgttgatatctcattctggttttgttgcattttcctgatgattagtgatattaagcatcttttcatacacctgttggccatttgtcagtcttctttggaaaattgcctgttcaagtcccctgtctcatttttaaaatcaggttggttcgtttgctgttgagttgtatgcgttccttatatattttggatattaaccgcttatcagatatatggtttgtaagacaagtttttattacatacttatttcgaagtacagtgtccattatactttcactgtccttacttttctgttatgcaatataatatcttgcccaggtaaaagtataaagaatactcaggttacaaaccaaaagcagtaaacaaatacaaaattacattaaagggaaatggtgtgaaagtagagagaggagatacatttttattcaatgcctcctatgttccaagtactctatcagatactttacatagtatatttcgtgtaatcctcatgataagcatgacaagagacaaatgagaaaaataaggctgtgagaagtgagggtcagactcttggttggcaagtcatccagagctggaatttaaactcatatgccatatgtcccatcatttacccagacacataaatatcactccatatcatcctacataagtacatgctgtcataatttttatattttttaattcttcttgcagccagagaggtagaataaaatgtagaaaaatgtggtgtcatagagaccaatgaatacataaataaatgaatgaatggggtatatatattgtatacttccatttctagacagactctattaaagaatcagcacaccagctgcttgcatttgctctttatctattggctctggtaaaactgtaaagcaagaaattttttttttctcccgtttgttgctcttccatacctctttcctcttatatgctagaacttttctgttgttactgtcagtgtacaccaaatatggcaacacaaaactattcctagaacatactaatgcttaaatatagatcttcccctatttagcagattttcgtgtgtacagtacattattgttaactataagcacaaagatctctagaacttattcatcttgcataactgaaactctgtacacactgaacaggaattcctcatctgcccctctctccagccccaggcaatcaccattctacttcctgcttctaagagtttggctattttagataccttatataagtgggatcatgtagtatttgtccttctgtaagtggcttagttcacttagagtaatgtcctcaaggttcatccatgttgttgcatatgacaggattttctttctttttaatacttaataataccacattttctttatccattcatctgttgatggacatttaggtcgcttccacctcttggctattgtgaataatgctgcaatgaacatggaagtgcaagtatcgctttcagatcttgatttattttggttaaatacccagaattgagattgctagactatatggtagttctctttaattttttgaggaacctccatactgttttccatagtggctgcaccattttacattcctactaacagtgcacaagggttccaatttctccccattctcaccaacacttgttattttgtgtgtgtgtgtgtgtgtgtgtgtgtgtgtgtgtttaataatggccaccttaacaggtttgaggttacatctcattatggttttggtgtgcattttcctgatgattagtgatgttgagcactttctcatatatgtgttggtcgtttgtatgtcttcttaggaaaaatatctattcgggtgttttgcccatttttaaattgggtttttttttctattcagttgtagaagctcttaaaatattgtgggtattaaccccttattagatacatgatttgcaaatattttctcccattccataggtcatttattcactctattgattgtttcatttgctgcacagaagctttttagtttgatgtactttcacttctctaattttaattttcttgcctgtgcttttggtgtgatatccaagaaatcattgccaaggccaatataataaagctttccccctatatttttatctaagtcctttgtgttgctataaaggaatacctgagagcaggtactttataaagaaaagaagtttatttggctcatggttctgcaagctgtacacaagaagcatgacgccaacatctgcatctgttgagggcctcaagccactttagttcatggcagaaggggaaggtgaggcagcgcatgcagagatcacatggtgagagaggaggcaagagagagatgggggtcatactccttgtaacaatcagctctcactggaactaataaagtgagaactcacacaataccttgaggatggtaccaagctattaatgggggatttgcctccatgatccagacacctcccattaggccctacctccaacactggggattaaatttcaacataagattatgaggggtcaaacaaaccaaactatagcaattttctttaaggagttttatagtttcaggtcttatgtttaagtctgcaatccattttgaattgatttttgtgtatggtgtaaaataaatgtccaatttcattcttttacatgtgatctagtttttgtacaaatgttttcccagcaccatttgttggagagattatcttttccttgttgtatattcttggcatccttattgaagatcagttgaccacatatgcttgggtttatttctgggctttctgttctgttccattgatctgtgtgtctgtctttatgccggtaccataaagttttgattactgtggctttgtaatatgttttcaaatcaagaagcatgagatctccagctttactcttctttttcaagattgctttgattattcaggatccttcgtagttccatttgaattttaaggttatttttgctatttctgtcaaaaatacacttgggatttcggaagggattgcattgaatatgcagaaagttttggataatatggacattttaacatattaagtctttcaacccgtaaacacgggatgtctttctatttaggtgtatcagcaaaaaaaaaaaaaaaaaaaaaaacccttataaactaataaacaaattcagtcaattgcaaaataaagaattaatgtgtttctatatactaacaacaaacaatctaaaagtgaaatttacaaagcaatcccatttacaatagtatcagaataaagtaccttggaataaactgaaccaaagagatgcaagtcttgctctctaaaaactacaaaacattcctgatcttttaacaaaacttaacctatcctctcaggactctgttaggtcacgggaaggctaatgtggtaaataaacaccaactgagttataaatggcttactggtttgtcttcccacatattgaccaggagtactttaacccaaaggtacaggtaataaggtaatatggactgaactgcctactgatgaaatatttttaaatgaatattaaaaaatttgtaaactgcaacacacaattgctctatctagcataaagtctgcctctttttttgcagaacagcatttgtacaaaattacatacattgtgaggtgtaaatacaaatagttattcttggaaaacctctctgaaattttaaagtaattccatgagaagacatcatttcagatttcctagtgttgcatacataacacgcttttcactgagtctggataaatatggtttgggaggaagtacaataaggaggcagtggaatttttttggatcacttaccatgtgcttgatgatttgcatgcattatttcatttgatctctttcaaactctttcaggtagatggttgtcccattttgcagatgaggaaattaaggctcagggtagtagcattcaggttcactcactgcaaggctggatgtgaagctgtatccacttggcttgaagctagttcttttccctttacacactaggtggccagccagggaattggagtacagagaaaggtgagtagctctgaaacctgagtggggccttgtgaatttaagccgccctgtccaggaaggtttcctgggagagtgaggttgaagaaactgcttaatatccctgaaatggaaatatttcagttactgccaaatgtgtagccaaaaatcaggttaaagtagtggtgaagttaatcttacaggttgtttaactgtcctcagttgcatttcgtggtgtccaagatcacctaataggtcctctagaggtgggcctgggttcctgaggatggcttaacaagcagggaggtagggccttcacatgattttcctctggttcccagcaacattctgccctgatcatcatagaaggatttagtctatgtgtttttcgttcgtttgttttttaaattatagaacaaccacttcagcttgctaaaagggcatctcctctctatacagtgatggtgcccttaggttctggttgtatggggataacctggctgaatgacttgtagatgttctcaagtgtccacagatccttttgtttttgcttaatgtgcccttgctgtcatttattctgctctcctgggaacatcagtacacttgatttgctaaattgtcagctcatgatatatttaccattaaccaaaacccaggcttatgtcatagtatggcaattagtgggagacctattttttttttttatttgaaggtgattaaattcatttagggtgaatagtatgaaagacatgagccctaaaggtatttgcaatttgcatggaattctggcaggtgtcaagtttgactgcattatctggtatctcttgctgttgacttgttaaaactggatctaaaaaaatgtaataatcttttatccctatagcagatctttccattatgataaaactcctgctggtagtcatctgatgaagaacttttccctgtggctatgatcctactgtgtccctacagtacaggcaactcaacccatggtggctactcacaaagactcacagaacctccaggacactgtcagtcccagcaaaaccttaccctgctttgttcccttcccacccccaatggccagttactgggtaattggggtggtgaaaagcccagcgcgatttcctgttggcagtgtgctgatgcaggagagggtatagcccctgggcatggttttggaatacccgggtgtcctctgaccttatcctctgtcctaatgaaaaacttcctggcgtctagtattgcggctctcactggggtcattctgacttaattattctaaaatcaaaatagataataggcagataatggaagttttttggactttctccttccattgttttagcgaaggaagaagacacacacaaatcctccatcccacactcagttctattttggcacctggtgaccgtcaggaaaacctgataaacttgaaagtgttgtttcccaatcaccttcagaactggagaaacgctttcatgctgactttatccatgggactgaagaaagggagagtgtgctcacaagcacaaacaggaaagccttacatcacggagtggcgtggggaggagtctgctcctcgcttgctcgctcgctcgccgcgctccctttgtggcccgagtcgcgcgcaccggcggcggcgggggcagcgcggcgcgtgtctgtgcgctgcggtcgctcgggaccgggaccggggcgaggcgccgcggggctgagcccagcagacattgcgttggcctccgagcagggcgcatcatgcagcgttcgcgcaccggagagaaaactgagaatgaaattgctttggcaagctaaaatggtaacgagagctctctgccttctcccgaggcttctctggtggggaatcttctcccgctttcgctgggcgtgttttggactccctcggagtgaacggagcaatccgattccatacttgtgagctaaagctctctcactccgctttgtattcctctctctctgcgtgtcttctccctttcaaccgtacctactttctcagcaattgcctgtggtgtgtctggggcagatgcatgtcaggaggggagaactttgaaggaaaaagaactgttagtgtgggtgaaccgcggagcgcttctgcgtcccagcggctctttaacacaaacctcaggtttagctggggacatggaaatccagggggtcgctgcacagattttagtagaagctgcctgatgatgtgttgctttttctgcacttgccagattattttacggaaataaaaactttccacccccgctaactttgtgggctccaaaacaatgaggagaaaagacaagcaaaccacttcacttccaaaggagtgaggactcttggcgttttaaacacttgtttgtgtctgagtttaaaatctggtttcttcaatgaccgagccactctaaaaagtacagacttattcttttctttttttctttttctttttttttttctttttcttttcttttcttttttttttttttttttttttttttttacaaagaattatttttcctttcacttaagggggacaagttaatcaggactaatctagtttctttgtaaagaaaaagaaagacttcaaaacaaaactatttaagatatgtgagcaagtctaggagaaataactaaatggaaaagtcaggggatcctgataccacaggaagggactgcaagccaagaaaatctcagcattccctctatcaaaatgtgtcttgtattgcggattgtaatatttattttgaacagcccatcttgtgccctgagtgctgttgtaagcagcaaggcagctgggatagattgtggttagcagagaggaaaaaaatactctttttctttctctttatcccgtccctggcagagctcgattcaggactggggtgaagaggtagaggaaggagctgtttaccatgtcaccctcaaaagagtccagattcaacaggctgccaataaaggagcaagatggctaggggtgagtaaagctggcgagatggtgaactttggaatttcagtgtctgtcgttctgtgaatatcattattatttaacagaggcaggcttttttttttttcctcttttcgctttaaaaaggaaaatgctaatgaccaagtgtttgcactagctgaacaggtctctttttgtatttaatgttttcaaaagcatcttccctaggtttgtcaataattcagaacctcttagaaacatcttgaggtctttggcaaatagattgggggtggagtggcagaaaatgacacacagaatacaggcccagagagcagcactctcttagacaagagccataagcagctttgcccagaagccacccttgtctctctctgccctcccccaattgatgctgtcagcgtctgccttgctcctatatctctaggaggtacccagattgctcaggagacagagcattccaagtctgcatcctttgaggggtggtagatttcctattgtgatctcttttctatatcttgggaggaggcaaatggatgcttagtacccactactttgtgtgtagagtggtgggcctttggaaaaatgctgcttctgtaaacaggactcttttccactgagattgtaaaatattgggtgaggtcatgcaagtttgtaggtatcacctagtagatccttcaacacatcccaaataaagcgaatatgagaaatggaaagctcagcgacaggatcactacttgggcaaatgtcaaacatgtggaagaatgaagggattcttgatctggaaggagaagtagttctcagaccaggcagtgagaggcgacccaaaaagccttgagaaagaaaataatggttggctgaatagagggggtggagtgtgatttcacctggctggccttattttagccgatgggcttcagagtgttgaagatttatgcacttgcatcccatctttagcggcttggagtctctgaaaattcagaatattttgagcagcattcaaaggtggagtgtgaaggaggataggacacaaaattgcacagggcctcctgttaagagtagtggtaacgtgtgacttgtaactccagggagtttaaggcaggatggtggcccatggccggcagcaatcacttcctctgccatgagtctgctgacacaggcattcattgctttgggcttccccagctgcttcagctcaggcctttcctgctactgtactttgggccaaggtatcacccatgagggccagaaattgttaatgacatctgcaggtgtggtctggaaagataggagctttccagtgagaactagaggtcttcacttaccaagtacctaccttactcagaatatgattttaaaattaattatgtatatcactagcagacctgatagggaaagcagaactagagttctgacaagtcatcactttgtttttggtggttgtgtgtatgtattttatttaaatgtggcgtccatgtggtttggcctctagctatttcagaatgattcacaacttctgaaccagttgtcttcaaaagggtcattacatttttttggtatcaggttattcctctctttctaatgagactgactttgcttgggtgactgttttagttttcagccatatacaacattagttatgagtaagtcattggaaatggaggggttcactctgtaggccccacatctacaaactgtcatgtatttagatgctcagagttatttagtaatccccactgactgttctcttcactagacttcacttcttttcttctctctcccttctctcagtgttctcaaatttatacagagttcagagttaattcaccctggattcaacagtagatatgaaatactgagaaggaggataatgtgaaaagattggctctagttgatggaggaatctgtccccctcgcccccatttcaacaaagtgtgatttactgctaccagcctactcctttattgcaagttcctaggggctctccagctctaatctacgtgttttcttgtcttaggtgtcctgttgggaagttctgtttttgtccttgaaaattccagacttaattaaatgtgactcaacccattgagccatagcaattacaaacctttctctttagaactgagtggcttccccatgtttgttttcctgtattccagtaccctttcaaaattcttcaaagtaactagtttcagagttactagagagtggggtcaggtgaggaaattattgcaatatgacaacaaccttctgaggaaggtggtgttgtgatgatctctctctctctcttttttttttttttaacatgaggagactaatgcccagagaggttaaattgtttgccagggtcacacagctatgaagtggtaaacaccagattcaaatccagatggttggctctttgttgtgaagaatttcctgggaccttaaggctgtttccatagtagtagaaaagaacattggctcaaaagactgaggatgctttgggtgtgcttttccctaatgttgcaagactggagagatgtaactttcttttcttcatgtctagaatgataacttgagctgcaaattgagatatttgttgcgaagctatgatctcactgataaactccccattttggaggtttaaagcagggtgcattgaagatatgaagatacgtatgaggttatgtagcatgtgaggataggcatagctttgttacgtgtctgtaatgcttattccagatgcctaaaagatggaacataatttttgtattttctagtattcagatctcaaaacataattaagattcaattttggggaggagagcaaaataattacatatcctcagatgtgaagtattatacagtccaaaacatttaggtcattcttttttattttgtctgttaaattctgtgttcagttgatcttttaaagtaaaactctgtgtttggaaaactacaaccaagtatgtcccaggcccagtttacttgtacgtgcagctgcatccttgcccattgacggtgagattatattggcaactttgaaaaaccaaatattattgaaatactgacccattttccctttacaataacatctttggctgggataattttacccacctataattctcgaagaaaaatgacttcaattatgtcacaaaatttaaaaaatcttaggattggaagagacattaaagagcaattccgagcctagcacagtggctcattcttgtaatcccagcactttgagaggccaaggcaggctaatttgcttgaggctgggagctcaagaccagcctgggcaacatagcaagaccctgtctctactaaaaataaaaataaaattaaaaaattagctgagtgtggtggtgtgtgcctgtagtcccagctacttgggaggctgaggtgggaggatcgcgtgagccagggtggtcaaggctgtagcgagccatgattgcaccactgcactctagcctgagtgagagagtgagactctgtctcttaaaaaaagaagtaatttcacccagacattcacttatcttgtgatttttggaagagcaaagtgtcaaaacttgttatttgtctttggtcccagtgttgtggttgtatatggacagtgaataatatagaaaagagttaagaaaatatcagtatcctctggaagcaggaagtgtaacatttcaggatgaatactcaaagggacagaggaaaagaattcaactgtttgggaagggctttggtgtcagaagttcatgctgttgtcttcagaatatgacagactcagggtccaaaaaacatgtcagcctaagataagttccaagtgaggatattttttttacaagcaagattgtgagtgctaggtcacttctgcaaaatttgtgggcagtggaatgatcagtggttagtcacgtggctcttcttagtcctgtacttctgtggtcatgcagtccttgtggtggggcactgaggcctttctgccctgtgtccagtgtttgtcacaccgtttcccacataggctcttgataaatgtttgtgggactgagttgaaatgcaagatagatgggagtctggtaaagagagggaaatagaatggagaaagttgaatatatgtagaaataaaagaacctagaaacattaggtcatagaacgtggcatttgggcaaattgtggccaatcatgggttatgtggggactgtggtaagataaccatttgtcacatctggattgagaagttgactctcacttggatgttctatttagattgactctacctggcattttcatggtgttgctatccatgttgccttcaaatggcatacagttcctggagttttcagctaatttcacttctgggagccttctctaatcccccagctctggatgaggcgtcccttctgtgtgctccagaggcattctgcgtctcactgttgtgcatttacctcactctgttgtaattgcctgtttacttgtttgttatcttccattagactgtaagcttgcaaccatggccatctagttggcagaaactcaatacatgtttgttgaatgaataggtcatgcctcatccttctttgggggactaatattgtttttataagtatgaatgcatagttggttctcatttaaaacaaagtctacatgaagatgttcacttacaaagaagaagaaaggggcatgggagcaagaaaaatcaattaggtaatgattatagctgtcttacacccattcgagaacaaagcagggcacaaaggtatcaattattcattttaacgaacattccccagtgccttttaaaaccaagaggtccagttgtacttctcttgctgctgaatgttgaagaaaaaaaaggcaatgcatgagttaaaaagcattggctagcattacaattatgtgtggttggaaagtgcaggagtgggattttagaattgtaaggagataagccctagaggagcctttagtttatagttggtcatccttgttttcatctaggaaaacaggcccttgggttgcattatatgtgtctattggaatgtttaatttaggctttagaaagtagatttcagaatttagcagctatgtgtaaatgaaccaactggtatttttaattttgaccttagaaacacgtttttaaaattattaatccactgatagggtagcctctaccaatcaagaaaatttagtaaatttaaattgcctgagatattattacactggatccttttggtgctagtgctttcaaattctgttgggatctgtgttaggaatatgtgacatgtaatcaagaatatccatttcaattcaccaatccagggaatactcagctgagttcaaaatacatgtcaactcccagcaaatacataatggcataaatataagaggcacattaattccttatacttaaaagtgtatattctgttaaaacaattttatgaacatattttattcttatttctgtgaaatcataaagaaaaagcctcttggagttttactcttagaaagaaaatgagagaaataaggtaaatactgtgcctttccactttagagcttagctggaatttgtcactgcccaattccactccctttagtttcctttgcccatggtatatgtgtctctttaagcttcccccttctaaataatcagaattttttgactgtcttacgtattttatgttaagatatgcaaaaatgcactacatagtaaaacattctaatttgtaccatcatattctttttacataaaaaattagtttctataaacagagcaagaaaagttttggttaagtgggggaagataagaaatgttacttcattccaccagagaagctcagctctgtgtctgggttgccaatgggtgtggctatctcaagacgtagagttgatttggagttctttggagattttggcagtttctgggtcatttgctagtaaacacatccagtgtgaactccctcgctgctgttgcatatttctatatgattctgtcatttgcatttgagcctgctaaactctccttccataccattcatttattcatcaaaagcctgctttatgccagacaccatgttaaatcttgagaatacaaagtaaaatactccttgttctagaggaacttacaagtaagtgagggagacaaagttgaattaattacaatatattgtggcaagtgtgaccattgctaggggagcccagaatcaggggcatttaaatcaaatgcgagtgacaggtgggcagtccaggaagcctgcacagaggagagggcccttcagtggagaagtgacggatgagtgagagttaaatgagggctgggacgctgggggccagcattccaactagagagcacagcctgtgggaaggtgtggaggcctgaaatgagacttcccctgtgaggctcagcctggggaagagataagggaacccggtgggaaagggagaggaaagggggctggagagaaaggcatgagtcatgtcaccaagaacctggaatgctaagctatggaatctgcttcatctttaatgttagcatagtcattgaagagttttaagcagagtggcatggtcagatttgcattttagaacaatgactgacagctgcaggggagatgcatcggaagggagccagactggagcatggggacccaggaggaggctttctttagtggtaatgaagtgaagaaagggatgaggacctgactgaagctgtggcggcagagtggacaaggtaggtggggatgagtgtaggcggggcacagggcgaggattcctggcaggcacactggtttcaaagagcaggtcagcaaaaggctttctggagtcagtgttgtcctcttctcactgggtgaaatgtactggggacttcaagtcagccttcctccatatacactagcaaatgcctgcgttactgtcagaaggcttggcagaaaaaccagatccaggcatgcctgatgtgtcatgtctagagacgaaatcacagtttaggctcaccatgaacaaggcagaagccctgcttgacttctcagattccagagaactttgcagagttggtggtttctttttctttcttcctttctttttttaaagtcttctgtttccctacaaaccaaacaaattgaatctgaagaccatggagagagaataaatatggaacctgcaggactatgattacagagttgtattttagaaaacagcagttaaacttataattgtgttgttagggacacaagaaattttatggttaggtgtcctggtctttttccatcttcctacacaatgtgtttaaattctgtctgatactctttatcctagcagctgacattgctgttcttaaaggctcactctgattgctaattctcactccttgtataaaagaaaaatttcagtaagatagaatgcttccctagtttactgctacctcctctcagtctcactcactctctcacttaaatacacacacagcctatatattaaaatgtcttttcacattttattttttaggatttggttcaccttataatgtcacttatggcctcttctatataattgatcaaagcttgattttgtcatgttttgcttgatttcccttaattgtgtcattattgagattgtttgattgactttactcagagaactgcttttagtttaaaaaggaataaaaacagaggaagaaaggaaggactaaaagtagaacaagcttacaacattgggtagaagacaccaccttgtaggaagctcagttagtctcatacagagagagagagagagaatcatgtcatttcccactgatccttttgtcttgtcattgtagaaatacctgtgtctttccactgatgtgactgcatatgtttcccaatgctttgggcctctgcttggcttgtttcctcaaaaccaccttctcctttatgttatgtggcgtatgacttctgaggataacagtggtggtggttgggggtggggtgttgctggtggttctagatcttttttaaactctcacagactcattaccctacattttctagcatgtaattgcttatgccatctgtggtccattcatttgaatttgtttcagcacagttaatctaatcctatgtaaactcccccagaagttttttatgtttttcttttctgcaaagaattcagcaattcaacttttttcccttgtttcctgctgttttaaatactcattttcatcttttataaaaatgaagccaaggctgagtatttccagtttcttaattctgaagacaatttgaaggcaaaaagcaaaccttttctgctaagggtaggatgtcttaggtcagtcatatcaactgaatctctccgcaaccctcttgctagtaattcttccatagttatgtgccattcttattatgcccataacttctgtcactaatggtgatggagctagagtctgtggacaatatttatctaagaaaagaacatttaagtatgtaggtaaaaataactgaaactggattagacattggctaaaaataaaatgctttatagtcatgacttttccaattaaaattgcaatacttggctgagcgcggtggctctcgcctgtaatcccagtactttgggaggtccggatgggtggatcacttgaggtcaagagttcaagaccagcctggccaacatggtgaaaacccacgtctctactaaacatacaaaagttagccaggcatggtggcatgtgcctgtaatcccagctgctggggaggttgaggcaggagaatcgcctgaacctgggaagtggaggttgcagtgagcagaaatggtgccactgcactctagcctgggcaacagagcgaaactccatctcaaaaaaaaaaaaattaaattgcaatacttgaaattgtttattgagataaatgatactcctaaatagaaaactgaggtaattgaagcatttggttagtttgtgaagcacagggaaaagacttgccactttctgtccaaaggctgattccttctaaagacatgacacaataaacatgtctgttttaaaaatgactttagggcccagagccatcaaggcctggctagggaattagctcagttggggacttcgtagacactggcacctcctggctgcttttcattttcaggggtatgttcagcaggagccctggaatagggaggtagcttagcacagtggtcaagaacctatgctttagagccagacttccatgcaaaactcacctctaccacatgtgagctatacaggcctgagctgtgaagttacttaacctctctaggcctgagctccttacctgtaacggggagaatagcagtgccttcctgatggaatgactgtcaggagtaaatgagttatgtatgtaaggtgctaggatatggtgtgcactcaactcactgagtggtggggctctcgtcagcacccccaccatcagggccctctagaaccctgccatagaaccttggagagacctgggtggctttcttacatggaccccctgaagcttggtgttatatgtaaccccaggttgcttaagaaacagtattagcaaggttttaggacatgtcattaacatccctctctcattttgtacatttgagaggaaggaacaatcatggcagggtttagtaatcctcgtatattagaaataacatctattgtattttatctctctggctccttgcataatgaaagactgcattattcctcgggctccaacattttgcatttgaaattccttcagttttctaaagtaatttgttggtattatttttatgctttaaaaaatattttattacttaacagtgggccatattctgtcttctgttttgccatttctgacagaaaaatcagacagtcggaaacaatttttctaaaaactgcttggtaagcattatgctaatctttcttaataggacataatttaggatgttagtaaattgttcttgcaccatcagtttcaagtcctggactaaactacatgagataaagataaaatttcttactgtgctacacgttgattagcttatacaatgcctgagccccactgcctcagccaggaatgagctgagttgcttgtgaggttgtgactttctgaatcttccatttcctcacctgtgaaatggcgttaatatctgtttttactctgcctatgatttttgtgaggatcagatgagttaatgtgtataaaagtattttttaatatgtaagtttttatacaaatataaggatattcttactgtcatttaacctagaggcctttttttctctctgctcaccacctaaatgcttgataggcatgtggctctgtttattagtcttgcctttcttccttcattccagaggcaatcttttctactttgttttcttcccacttgctgccacttgctgattaactaatgagaggtgatgttcagctaggaggagtgcttcctctgctaccaccgttgtccccactgggattccaggtgcatcgagaatgcagacagcaaggcttctgtttgtagattggttgtgggaaaaaaaaaccccatactcacaggattcttaagacaaatgcagtggatattttgtgtttgaaaatgttctatttcttctttgattcttccttttctttctggtacttttaatttgttgtgagaagggtgataaagctaataatgcaccaaggaatggaaagtgcttccatctttgcagaggtcctggaaagttaacttttggtctgaagccaaatcccgatgtaggacttgaactcatgacctaatcccagaggcaagaatgttaccagctgaccaacactgaccctcataaaatgtagacatttaaaatactcctttgagtagtcctgttgctgctttctatgttttcttctctctttcagtcgtttccagcagtgttcctggcctccctgttaggagcacagttttaaagatctatttttctcactgtctttccatttgctgattatagctgcttccttcttgctttccatttctcttgtgtgagttcctttttttgttcctgttccttcctgtccttcttctgacttaaaaatagattccagggtctttggctgctcggccacaaatccgaccttccttctattcatatgggatccccctgagcatctaaagatcttttccttctctctcaagatacttgaaccccagcattcattccctgttctcagctgacttgtggagctaaatgacccttgtactcagagctgtaactgaaaattaaatctctcctacaaagatgcttaataagtgatttacttatgttaagtgttactgacaaacactgaattctccctgaatctactgactgtgtgtggtggtagaggagaagggactctttgtacactgactcaaggcatgcgtgtaacactcgtttttgtgcaaagcaatggtactgtgaccatttgaacctcaggaaccagctttcagacaacgtactgttaagggtatcctggagggacctgctgctgttttgttcccacagaagtgtttctcagggaccgaaagttgattaaagtgtttcctcatgaacattctttggttagagttggaggattatgatattctttacagaaatgacttcctatccaatgttgatctagacaatccacaaatgagtgtctgctcgagggataaaggcttgtaaaactttagatgactgggataaaaagtgctgatgacagcagctctgatttcagtgcccaaccccaacctgaaatcactattatgctcttgttacagcagcagggatgatgatcctcttctcagtggcaaaagaggtttaaaaggtttccttccatctggacctccagacataacctatgtggttatgtctccatgaaaagacctggtcctattcttagtagagaatccggagtttttggtttcatcagccatagtgaagttcacatttatgtgcagctctcttatcactgtgtcactgcttatggcattgcatttacctgccctgcttttctgttcactggttgactgatgaatcctacttaaccctttaagttgcagctcaaatgttatctttactcttctacttttcccaacctctcttctggattaaggatccttttatctgagcttccttagcactttaccaaaagctgtattacagcacttatcacactattaaaaaaaaatgtttctctttgccctattcgtttcagtgtttcatgaaagggcgggggccatatttaattaatcatcatattcccgtaacctgggacagtgtttgagacatagttagtacttagtgagcatcttataaattgtttggccttatctttattatagaacgtgtatctttagtgacttttttttggtatttggtaatattgtaagttccattttttgaagcaaaaggaaaacattgaagcagctaaatttagcttatattttatactccaactactgataacaataaaaaaaagaaagtgatgcttttgcctcatctttgtcatcattacttgacctacacatttcatgattgtatgaaaagtggcctaggtatgacagtaacctttatagatgggatgacttggaatttagagttaatccatatacttcttagtgacatataggtttgagtcatgggtcaaggatagacctctgggaactcagtttctgctttgaattctgaagttattctacttaggattttcatgtatcttattatatctggtatctgaggcctataattggcttcaaacttgcattgacccactgtcaagccaataaggctttgccctacataacacatttttatgaagggatctgacacatctccatgaacatagtaatgaaggttatgcccataatgatgaggcctgttactctgagatttatgttgcaggcttgtcctgtagtgtactttgtgtggtgcacctttcttaccggaactcacaggcaaaaggagacttaataagtgacataaattacataatattttgggtatacttttacattttcattagtacaactcaattcccttgctctctggccctccgacacttttctttattctgtggttttacattcttaagtttgaaattttcactttaggcaaaatgtaaagtttatgcaagaggttttcagaattctagaatttcagaattctgtttttaggtgctttcatttacattgtcccaaatgtaattggctccattaaaattaagtgttctgatggcttctgaaccttcctgcatgcttccttgcctttttctttgcatcggtgttcaatggcataaatgtttgctttagaaaagaaggatggacttttttttaaagcaatgccattcttaaaagagtgttgaagcaacattatacttttttttttttttttaagagacagggtcttgttctgtcgcccagtctggagtacagtggtgtgatcatagttcactgcagctttgaactgctggtctcaaagggttctcctgcctcagcctcccgaggggctgagactgcaggtgcacaccaccatgcctggctaatttttaaattttttgtagagatggggggtctcgctatgttgcccaagcttgtcttgaactcctagcctcaagcgatcctcccaccttgggcccctaaagtgctgggattacaggcgtgagccaccatgactagcccattttgttttgtttcgttttgatttaaagaagaagaaaatcatctataattctgccatgataacacagttcttttcacttttacttattatcttccaatttttgttcacaggcacacattttaacatagttgcaatcatgctatctattccgtttgtgataggcaggaaatatttttcagaacaaattagaaaggttactttctaatttgaatcgtttgtgatatttgttatgtttctgatgccacagacaaaagaatgtatttggacttggtgtttgaggagttttaaggtgataatgcttatttattggttaatgagcctcatttctgttttttacccccacgaaatctcccatcctgtatcaggggtgtggggcttgcatgaggaccctgatagcaccatatgagatgagggcatgtgacaaacgtgcagtggaattcagctggagtggatggtgctctttccttctgcttctagacatcattgccactctcttgctctggaggatgtgggtccagaactctctaggcctgtgctgttcaatatggtaacaactagccatatgtgcctattgagcacttgaaatatagccagtcctaattgaaatgttctgtacctgtaaaatccgcaccagagtttgaaaaaataatgtaaaatatctcagtaatttcctatagtgatcacatgttaaaatggtaatactgtgggtaaaatgggttaaataaaatgtatcgttaaaattaattttatggctgggcgcggtggctcatgcctgtaatcccagcactttgggattacatacaccaggctgaggctggtggatcacctgaagtcaggagtttgagaccagcctggccaacatggtgaaaccccgtctctactaaaactacaaaaattagctgggcgtggtggtgggcgcctgtaatcccagctactcgggaggctgaggcatgagaattgcttgtacccaagaggcagaggttgcagtgagctgagattgcgccactgcagtccagcctgggcgacaagagcgaaactccgtctaaaataataataataataataataatacttgtacctgtttcttttcaatgtttttaatttggcaactaaaaaattttaaattgcctatggctagcattatatttctactagacaatgttgctctcaggccttacttttcaaaatgcagcttgtggtttatttgtgggttctgaagtcagttaggtgggctaaaaatcaatattttaaaatcagaacagaatggaatagaaaatattagaatgtcattattgtaaaactttttgtttaaagtatgcatgtgtggactggatcccatgtaaaatgtattttttctttttactatgaatcatggctaaaaagtttgaagattagtaatctggggtggcctgacttaatctgaagcattaccaggaggcctggtctgctctgtaagagggcaggttggtaccaggaacactttatagattttaggtctggttggtaaaagctattctgggactcttcaactagaccagaccctgcaggaaagtaaacctgaacattagtgctcatcctaaaagcagtggccactcaggagacttccagagtgaagggtgaactaaggatagcttactgaaagctggacctgtgtgctcaaccctaaagtgtccctggagtccaagaatgacttttgtctggttacttgcttctcggagactttttcaaaatggtctcatgagtggtgatactttctaagaagcaggatgatttcctaatgaccttagagccaagatgaattggacagggttccttgtgaccctcaggtcctccctgcatcatatcctgttgaaatcagaagagactgtattctaatctagaagcatgtctgtcttcttcctgcctgacagaaaacatgtccttacagtacaaaagatgtaggggtggtcaccagagctgtacttttggctgggttctaaataaatgacactgtaagccacagagagaagggagaaaaggctccaaaaatgaagtttatggggttacatgggccttgtatttattctgacagttgtaaaaattcttttgggctgacccatttttcttttcttaattaaaaaaaaaatatctggcaggcaagaggaagaaatgtaaaccatgtgactaatgcttcagctttttctcctggagccagattctttaaaaattataccttagacatgtttgactttttaaaaacaattgcccacaaaagccaccaaacatttttttttctgaaacttgtagacttagatagcattcattttcaggaaggaatccaaaagtacaatatttaggagttattgaaccaaaatctcctttggagattttgccctggtgaattagattaccctaggaattggcagaggaacaggcggccttttgcctctactttgcttgagtatttccagtcctgttggtagccacccaaaatgtttgagggagttagactaaaagatcgtcaaggtcctttgtagacgaaaagtactatgactccagtgacggaatgacatggcagtcaggagttatgtttatgttgacctcttgttttatacttattgcaaacaatttgtttgtttactcactcactcaaatttgagcacttactatgtgccaaatgttggcctttgtaggaaaatcataggattttagagcacttatcatagtagatttgagggcttcaaagtcaagttccaatctccctttctggggtgatttcctatgtctcacttttgcaactccacacttcagctaactgggctattttcctgttttagggtcttttctcttgctgttgccagggtctaaaatgtcctcctttccttaatgccagacatctttaaatcgccagacatcactcaaattctagctcaaatgttacttctgtgagtcctctctggtttctcaaaaggtagtaagtgattcttctctcaagccaaagcactttgtacttcttttttttaacaccacacataatcttcttagaatgaactgtatgaaatcaccagttttataagttaaaaatggttaaatattggcagcttcatacagttccagctaatattaactgtgttattgtatggaacttaaattaggcctctataaatatattgcccccaagacttatagccagaaatattcttttgtcttttcttcaaaaatatgagttattattaaactaagtttcattaaacctgtgcttgcaagtttcatttaaaaaattaaatatagaaaatatttatttttaattttattagtcttagctaatcatctaaaattttgattcagtaaaccaatgtattagctataactttcagtgtagtttaataaggttctgtataattatctactttatttgttaaaatgatttcttcaacgtggctaaacataaagctctgtgatatattgctggagacattccccactcccagcaatactcgccagttaacatttttttcaccattcagtattccgtgacatctgatttggatacatatctaggcaactctacaattattcaacttacggagttccactgtagctatagagatctcaggagagagttggtgggatagttatttgaagtcaatgaatatcatgtctgtagcattccatgttacctgtatagaatcagagaaggatggaaagttagtttgatatgattttttttcttttaatttagagacagggtcttgctctgtcacacaagctggagtgcagtatggtcatagcttactgcagcctcaaacttctgggctcaagagatcctcctgtctcagcctcctggatggctaggactacaggcctatgcaatcccccatggctaattcttttaatttttttttagagatgggccttgctatgttacccaggctcatctcgaactcctgggcttaagtgatcctcctgctttggcctctcaaggtgttgggattatgggcatgagccactatacctggctgattttatttttctcggtgattttatgttagttcctagtgatcgttgcttacaaaccaaatctgggattttggggacatttgttggcagaactacccatccattgttttcagtctaccttaattgctgcctaaaaattggtataccttcttgtacaccctttagacaccactgtgattctaatttctgtgaagattccactcatcacatctgcttctccttttagtgtccttccaggttatttatccggccctggagacatgaaatcacttgaagggctaagtgctttcttactatcaccttctctatcttgggctttagtttcctcttcaccatgctggtcctaccctttccagtttgaagatcattttccttgatagggaggatagaagcaaaagaggagtgaagtagttctgctttttctttgttatcagttaacattaccccacctatcagcaaccactgccttcctatttttgctcctagaatagctgaaaaaagtccttttacttgaccttaacaattttgacaaggctcagttcattatactattcactttcatgttactgtgttttataaatatgtgctatcctaagtatatgtatagctttaattatgggacctgctttctatcttttataatttggaaaacatgtacaaccaccttgatctctttaggtgctttctttcattgcatattttaaatatttgtctcacctttcttgaagcctcttgcctgttaaagaaggtttatataataatgctttcctaatgtttgggatacatgtctgacacctgtacaagaatgtaatcaccctccgccaaggtttctatatatcctgcagcaaccatttttcataactgagcataattatgtctggactaatagttatttttatttcctcctatcagtagagtagataaaaacctagaagaaagcattgatagctattggtgagtgcttatatactgagagggaggagtcaaagataattccaagacttttggtgtatttgaacaaagagaacagtggtatcattagtagaaacagggattctgtgaagaacttctttgtggtgctggtgggagggtagtgatatagttatttgaattttagacatatcatgctggaagggtttctggattagaagagatttgggattagaggagtacatttgggtatcatttacacatcagtgatactttaagcagtaagaatgaatgatatagagaaaatggaaaataaaagagtattgcaggccaagtgtgagtaatgtcatgttcaggggaccaaaaggtagagaccagttagcctaggagtcagaaaagcatagctagggaggtagcagcagtaacaggctaattcattggcacagactttaggggaggccaaagttttaaatacataagactgtgtactctaaaaacaagtaacatcctgtcacttttggtcatttcagctttccaaagcatattttaaaactgaacattaatgaaaagcttctctgagtaacccaaatagctctcatcccataggaaaggccaggaggttatcattcttaatgcatatcatatcaattctgaatgcataacaaagttggttgtttatataaagtcataatgaagttccttgttccagttgagtagaagtagcaaatctgaagaaagtggggcttttagaagcagacacactcatagcaacaaaaactgacaatcccagtggaagcctatgttcaaatgtcaccttcttggtaaggccttgtctaatcactcatataaattgcaaccatgaaggccagacgcagaggcccacacctgtaatcctagcactttgggaggctgaggtgggaggattgcttgagcccaggagtatgagaccagcctgggcaaaatactgagaccctgtttctatttttaaaatcaatcaatcaatcaatcaatcaatcgcaactctccccatctctgtctctctcttttttttttttgagatggagtctcactctgttgcccaggctggagtgcagtggtgcgatcttggctcaccgcaagctccgcctccctggttcatgccattctcctgcctcagcctcctgagtagctgggactacaggcgcccaccaccacacccagctaagtttttgtatttttagtagagacggactttcagcatgttagccaagatggccctgtctctattttttaaataaacaaatctcaactccccctaaccctgcaactccctatcctccatttcagctttacttcctccttaacaccactgtctaatatacctttttatttgttcatttgtttcattgttattgattgattgattgctgcttcgtacattagaatgtaagttccatgaggacatgggttttggttgtttttttccccctgctatattcccaaagtctagaacagcacctagccgatggaagacacgtgattatttgtggaataaatgcatgtaagaagaagatgatgatgaaataccaggcataaaaataagaaaagtgtataggtatatagatcatttagctttggaataagcacttctatttatgtcagtttctctaggggaagatactacagttcattgtagcactgatggcctactgagctgtaaatgaaaggttaaactgtgctccggatgttctgcttttgaaggcagaaaaataacatatttcagtaacattttaatcaaataaatgaaacttttagaatgttgatgtttaaagggtccctccttgggaaaataattcctgtattgaacactaaattctcccatgaatgaccattattatgtgatttaaatgtacctttttttttcttttcttttcttttctttttcgagacagagtgtcactctgttgcccaggctggagtacagtggcatgatcttggctcactacaacctccgcctcccaggctcaagcaattctcgtgccttagcctcctaaatagctgggattacaggcatacgccaccatgcccagctaatttttgtgtttttaatagagtcagggttttgccatgttggccaggctggtcttgaactactggcctcaagtgatccacctgcctccacctcccaaagtgttgggattacaggtgtgagccactgcatccggccgtgtgccagtttcttaaaatttgatttttccttaaccttattgacaccctgaacaactttcttgcaggtccactggaaatgttaaacgttttgcctcctttttttccagtctcagagacctttaacccaaaggtgtggaattaacccaaaggtgtggagctacagagaaatatatggcagctaaacttaaaaactgttaaactggaatctctcccactggttttgctttcacagactgttgctttattgtaggacgtcagtggcctgtttgttactctcatgtctttttggcaaaatgaatgagtaagtgcttctaaattactgtgagatgcctgtcgaattgcataagtagatttgaaaaatgctgtattttcgattaaggtatagctgcaaagcatagctcttcagttcaagaggcgtagcctgacctcctacacattttacccttctccacagttgcctcttagtccttgaaaaaacatttttttcttattccctctctttcattatttacgttggatacaatagctgtgtacgctatttccctggctcaatataatataagtttttaaactttacaatctatggtagtgactgagaaaaactttttaatgtgaagggaaagtgtccccactttaattagaatgacaaagcagtatggagttatgtaataggtattcatgcagctccattggttacataatataatggtcactcacaacagatacttaaatccatttcacatccaggaccattgtgtccacttgcagagacagtgctttctttgttttcaccaaataaatagctagtgattattagcttagcttttaagttaaatcacattcctggaaagggaaatgttgcaacttttttttaataggagaggagaatgcatttttgaaaatccaaacatactattactgccagtgatatgaccattacacctctttgacaagagaaacctatgttttatttaatttagacagttataatttcacatagtcacatgacctttatcctgttaatatgcaatctaaatatttgtcttcaaacggtttcagtaacatggaacagccatgacttaatttgcctacgatgatgtcttttcccttccagcaccccgtaagtggaattttgacttgttgctgagtttgtgatttatttacagcatctgacatggagtaggtcttaactacttggcatgtgtggagtgggggtagagggcagcacgtggggatgtcttcagtgagcaaatggggggcctgacctactcggccgtctggtgctgctccttccgtgaggctttggagtctgagggatctgggttctgtctttcgactcttggctctgtcaattactagtaatgtgaccaggtggattgcttgtcctgtttgagcctcagtgtcctcatctataaactgagattattgtgagtatcaaatgagattgtgtatttaaaagggcttcgaatattagacacaaccaaagataatgattcccaatctgaaatttactagtcaaaaatgaacttgtaacactgattgacttctgtattcatttcctctgatctgctccagtcaggaacaagttaaagcaagtgtatgcttctactcggaataaaactggtatcagtcaatgacaatggaaaaagaataaaatttgcccctttctatgggtgaggaagagagttggagaggagaataataacactgtgctcagtagaagcagatgactttacttcagtcatggtttatttcattttgtcatcataggaatttctctaatattgttaccatggttcttaatcatcaatgcttgttataataaccgggattgaatgcaccttcttcagttacagggatttggatttagggagttggaggtggggcccgtgaatctacttttaacaagtaccccaggtgattctgatgaaggtggatcagccaggcatggtggctcatgcctgtaatcccagaactttgggaggctgaggcaggaggatagcttgagcccatgagtctacctgggcaatatagtgagacctcgtctctatgaaaaaaataaaaaaattagctgggcacaatggtgtatacctgtagtcccagctattcaggaagctgaggtgagaggattgcttgagcctgagaggtggaggttgcatgaaccatgatcgtgctactgcactccagcctaggcgacagaacaagaccctgcttaaaaaaaaaaaaaaaaagtagatcgtgatcaacatttaggaaattttgctcccatcactgttgctttctccagtagttttctaagtgaatcttttctttttttcatacagttcattcttcatgtaaactcattcatcatgatatactcatatttacacttacatttgatcctgataatacccacctgcttaaaaccctttaaaagcttcacattgatactaagttgagtatcaaagctcttctggctgagcttccaccactctcccttggttcactctcctttggccacatcaacttctttttatccttcttgtattccaagttacttcatggcatttgcacatgctgttccctcccctgaaacgttctctctctcaccatttatctggtgcacacctactgattattcccatgtttcctcagtgaaatttatcttatatctaagacaaaacctgatcctctcatgtttttaagcagctttttatagggagcaatggtttctaccgccattagacagttgttaaattatcttctctgcttgaatgttggcttcatgaggatagggagtgtgtctgtgttgttcatttctgtatccacagtgtcctataatagtatgcagaatatagtggaagctcaggaaatattctgaaaaatgaatgaaaatgggatttgtggcaaagaagtgatgctctagtcctccacttatgaggatttaatgactgatgcagtgagtgggcctttttataaagtggcaatgcgcctaacttagcattctagaatgagatgtttatttcagtgataaaaacttcttataagttcagacacctcaaacaatatcctttgtgttcaacgcttagaacctggtatgggaaaaaggggaagttataaagatttcagatgaaatcctgacttattttgcatgacatctttcatgcagaaagtattggaagctgcttggtagtccaatgcctcacaagtaaatttcttgcaatgtatttatttatacttatatcacatagctggttgattagattgtgtattcatttcctcagatactcccacttggagtggtaaaaagtcaagtaagtgcatattcccactctctgttttcgaagcaaacagttggcccagtggcatctacatcagatagaacaataagagcaatgtcagccccagagaatgagagatctttgttatgtgtagcttgattcagcatctcaatcttgttgggaaaagaattctggagaaaaaaaaaacccatgacttaagtaatttttaaaatcatgataaccaaatatagaattaattggtcttcaaaaaaatctcagaacagtcattttaataaattcactgcagttctcaactgctatgaagagatgggaccagttaattttgtttacttgaaatttttagttcagaaaaacagatttttgtatttttcaaggtatccatggagtttcgcatgcattgaattcagatttaaaaataatatgcaatttacttacagtattactttgttttccattcattaccacaaatatttactgagcatccattatgtagtagacattattttatgcaccagagacacagtggtgggcaagacagttaagggctctgaacccatggagtttacaggcaacaaacaagtaaagaagtcagtactatcaataaattagtctagataaggtaatctggtgtggcaggggaagatgggaagtgtgacactgaccagaggggtgctctagggggtttatctgagtaagtactgcccaatgaaaagaaggcaataaggagccagtctgagaacatgctcaggctgagcagcatttaaggcagatggaacaaatgcaaagatccttccatgagaatgagcttgctgtgttttaggaactgaaggaaggccagtgtggttggggcctagagagggaaggagatggttttggtagtgaggtcaaggagataggtaggaagggctttgtgaggtctggcagaaggctggatttcatttaaaggattatgggaagccagtgggaggttttaagtagggagtgacaccatctgatttgtgtttttaaaagatcaccatggatgccataagaacaatttaaaagattgtttattttagcagtccagctgagaggtgatgatcaagcattacatgcttttattgtatatgtacagactttatatgtacatatttttatttgactgaatttggaagaatcaagtaaaggttatttagggactataataatgtcactagatagattcattagattagaaacatatccatttaattaatattcatgaagagcttattgctgatttggttgaaggccaatttctagagatttaaatatgaatagtctttgctcttaaaaattttacagtctagtgcgggatacctataattaaataaatacaacctaatatgggaagtatatggctactatgaataaaactgtaataaatgtttctggccatgtcttttggtgggcatatacactcatttctgttgagaatatgtctgagtgaattggtgaattataggataggcatgtcaagctttagtagcttgttggactttattataaaagcaggatttgtactttagaaagatcattttgtatatggatgagtggttgaagtgataagactagaggcaagtgagactagttaggtgcctattactcatacccagttatggactgagatgtaaattaaggcaaaggcaatgaggctgaggaatgagaatgaagtgggacgatataggagatggaagaggttggattttggggggatgagggagtaaggatgatctgtacatttatgacttgggtcattaagtcagaggctagaaaaggggtgagcttttagaggaataaaatgaatttccttatgtatgtgttaaattagagttgtctgtgaattattcaggtgaatgtggtaattggaaattcaagtctagaattcagaagagaagtaaaagctgtagataaagctttgggagttaatataatatttgtgttaggtgaaactctaaggatatatgtgtgggatgaccagaaagagtatagaaaaagaggaaagaaggttgtggttagaaatgtttccatattgatggtaagtgaaggatgaggaactgttgatgagcctttagattcacagaagatttttgaggaagatgagatagtgtggttaagtctgactgtgggtccagactgcttgaatttgaatcctggcttttctgcctcttagctgtgtgacctggaatgagtcacttagcctctctgggtctcagttttcttatctgtaaaatggggataataaatgtatctgctttatgaggttattataagatatatacaaaatgcttggaattgttgttgttattgttattcttgagaaaatgatgtttataaggaaaaggtacagagtttcaggcgggaatcaatagtgccgattctacagggatatcacaggaggtaagtgctaaaacatttccaaaggattgacaaccagctggaagagtaatgggggcagaaacaaactctgtaggctaatcataataccgtccctttttgtaggaacacctattgaatttcataacataaacacacaagcaagatcacatggtttgcttgaaagcctctcaggttattgacataagtgctagtaataccttagtttaatatatagttctttaatttaaagcagctcaaagtgtatcctgtgttcttttgaatcaccctcataacatcaaggtgagttaaggaagatgaagataatattcttagtttacaaatgaggaaactaagactaagagaggccagatgactttatccaagcttttattaatcaacttctctgttatcccatcaataaaccctagtcatccttgttttcacattgtcaagcatagtatagctcaaagggtaatcaatagagattctgcagtttagaatcacctaggatgctggttaaaatgcagaccacctagcccttgttctgggtctactgatcggaatctctggggcatgggctcaggaatcagtttctgcccagcactccaggtgattctcttgaaaaccctttagtgtatttaagagaacaggcaaataaatccataaatgtatcttgtttattagtgagatttttcacaaaaaagtgttaaaatattttgtattcagaaactcaggctactataactaaaaccttagaaccttgttctgaacatattgtatgatttgctatatttttgcagttgaatagtacttttggttaaaagtaaaactgatttgaccttacaaatgaataatagaatccattggtaagttaccacagcactgctggagaagtcacagagaagctatggctgaggactctattttatatcgattcggttaatggccctacctgcagttagtatttttagttatatagtattgattagaaagagttgctctccctatatttatagcttcagtatgcatatgatgatgaaatgagccatatctctctctgtttttttttttttttttagcatagcagcataaaactctgaggctcaggtagctttgaagactgtctctaggaggtgggacctcataagagtctaggccaggtctaggtggtaaaagcctcgtgaatttactttcttatttaattgtagaggaggtgcatttatctgtatgagttggcgtcttatctgtctattaatttgttgtatctctggcttccagcagccccatagtaggaactcaacaaatatttgctgaatgaatgtatctactcaagtgtatttaggaacaaacaaaaacaaccaaatcaaaaggaattatcctagctcactaccgagatagctagttctagaaagcactagcaagtagctgataattaattgaactggaactagaaacagagtctagttccttgcccaccctccccttcattttttcctgactgccacctttatcattgaatcctaaggttgcgagaggccttaccccatcagttctgcaactccctctgtgaggctcctgcttatttacctggcatgtatttaatgtctatggcatatgcactagtactaagctctgtacccctttctttacacgtcattaaatgaagaaattcacactcatactatcatctctaaggtttttagagagtagaaattccttattccttttatagatttccttagtacctcatttgagttcttggcacaatggaggctcttctctttttattttgtattttttttatttttagagacagggacttggtctgttgcccaggctggagtgcagtggcacaatcatagctcattgtagccttgtactcgtccgttcaagagatcctttcacttcagcctcccaagtagctaggcacatatcaccacacccaggctaattttctaatttttttttacaaacagggtctcactatattgcccaggctagtcctgaactcctgacctcaagcgatcctcccacttcagcctcccaaagcactgggattatatgcatcagccaccgtgcctggccaaagcacttttaatactgttttaatgactgataccaagagcgggtcacaagccatggaaatgatgagcatcttcttaggaggataaatattttcttttcaaacaaatgcctatctttttacataaaattttgatcattaatatctagtaaacaaaatgtttgctttcttggtttctgttcatttggacaaattggatctgtgtttttttgccagctaccaggcctttctatatgctactttcttctttaaatgtttttttacaagtcagaatttataaatctgcccttttgtctggctgtatcccataatcaatcatattgtcattctgctttcatttccctttatttctgaaaatagaaggaaactgtcttttgactagagagtagatctctaaacctagcaggtaggaaaattatttaataatctggaaatcagagcagaacacgagtgctttccatggattcccagtctgtattacccagtagtttctcatgcagaagccagcttctcctggctttccttgagcccttgggttaagtcattcatccatctttcttagactcttagactaaatttactcatttaagaaactataataatgagagggattttgtttccccccaaagagagtctttggcactaagacgttattttttgtctttaggtgttaaggatttcagtcagtgtcaagaggtaagaaggataataccagagataataccagatgtaatcagacttaactttgggtgaaagtagttggtgtaggggaaagaaagtgaaaagtatttgtagagtgctgaatagcttgtaatctttcaacatgccttagatctattatctaactttctctttcttacaaaaatcctatgaagtctgtagattctgggcaattgagttctgataattcttgggtgtacagatatggagattgagtacccaataccgtattgctttgtgtttttagggaatattccatgattgaaagacagggctggttttatatccttgctttaatgcctatgctaattggctgggtaactctgggtgtgaccccttacttctccaaacctctgtttccttaagtgggaataattcctacactacagggttgttgtaagggttgagcatctaatccataatgtgcactcagtaaatacaagttagccttctttcttcatttacagtctaagaatggttttcttagaattaatgtatagcttatgaagaagaaaacctattaagaaaaaaagccagtttagtgtatcttttcttttcttttttttttagacggagttttgctcttgttgcccaggttggagtgcaatggcgcgatctcaggtcactgctacctccgcctcttgggttcaagcgagtctcctgcctcagcttcccgagtagctgggattacaggcacccgccatcacacccagctaatttttttttttttgtatttttttgtatttttagtagagatggggtttctccatgttggccaggatgatctcgaactcctgacctcaggtgatccacccacctaggccttccaaagtgcgggaatacaggcgtgagccactgcgcccggccttcagtgtatgtttcaaagaggtatactcaggatacacgcaactgtttttcatagaactttgccctaggtttgatcacctaataacatgcttgaaagacacctggtgggtttatcagtagccaattctagcaagcccatgatctaggaatattatacgtgccaaaaacagtgctgagggatagaatacttgccagagacactgcagcccagaggtttgtgagtcataaagctacatcttacatctgaatttataagtccacatagactttaaatatttcattttggaggggaagggatcaaactaaacaacgtcattattacttgaattccgagatccaggggagtaataattttattgtcattttggataatggggctttggtttttaacattacaataataggtaatcataacagtgggaactaaatgttcccataggaatcgcctaggtagggaaagtgcagaagattccttaatgtggtatacggagtaagaatcaaaaattaatgacttgactttaaagtttggaaacatcagttagttgctacccttccccgtactctccctggaggattggtgaaggagcacttataaatctcacaaggagataaagccccatggagctgtctgtgggatttatggcatgctgggaaagcttctgggctgtggggaagcctctccattcatagcaggcttcattcacagagaatattaggtcacacagaagctcactaccccctgctgacctttacagacagagattggttgggctgcacaaaaacagaatggactcaagcaagccagggcacctgttaacctgtgaccttagtttatgaagaccttggacatttgaggctctgaatgagagaaaaaggagggagctatgaattttggaagttcactctggatactaatttgtatgtgacaatttgtgatcttatttggcaaatgcaacagtgactattttaattcaaactcctctccctccgtgcaactcttaaatccttgaacttctcaaaattgcatgtgatgtattccttttataaagtaggtaacgaagtcattgaaactaagtttttgccctaggtccgacagtaaattggctccaaatggaaatgcaacctgttaattcataacgccttagttcagcagtccccaaccttttggcaccagggactggttttgtggaagacagtttttccatgaacgggggttgaggggtgttcgtttcaggatgaaactgtttcacctcagatcatcaggcattagttagattcccataagaagtgtacaacctaggtccctcgcatgtgcagttcacaataggcttggcgctcctatgagaatctaatgtcgccgctgatctgacaggaggtggagctcaggcagtaatgctggctcacctgccactcacctgctgctgtgaggcccggttcctaacaggccatagactgctactggtccatggtgcaggggttggagacccttgctttagttattggcattctgagtttcaagcagaaaagtatcagatgaaagtgaaattattttatttgaaaaatgtggtcggcaagcttcttaaaatccacttaatatttaaatttgctttctgggaaactttggaatccttaaaggatgaccagaatgtcagaaatggagatttgtgttagagaagatagaatctgttatggattaatgttggaccaagactccaggagtactactctttttcaggagatgagaaacacagcttcctgtttccttcaggagggttcctggactctatctaggaaaccctactgagacaggatggcaaagggggatgggatttctgtgtgataaaacactagctattgtttgttattacagctccctttacatcttcctgaggatgaaggatattcatcatagaagcctgaccacgtggcttcattctaacaagtggcttcaagcaaggtcaactcttggggctcgtgtagttttttcagagcacattcgtttgtcatacacatgcccttctgcctctcctgcctccacatttctactttcttcatagttcagaggtgtaattcccttcttctatcagataaagatcatggtgacaacacaaataccttaactggaacgtacacagaaagaaaatgtctcagccagtgtgaaggtgtctcttgacactgacacaatctgagagggacttctgggcaggggtatgctgataaactggccctccaaaataaaaaccctaatttgtagcattgctaattttcatggcgtaaatagtgtcaccatgtctgaactcacactaccaacatgatgccactgaatgcagaggtgaggagtgtgcacatttggctcgtgcaagaggttcaagctggctccagcataccgctgtctaagccttgatatgtttgtataattagagggaaggtacatatgtcagcacatatgtgaatctggtggtgaagatttcttctggtttctctgcccagaaatgccatcatagatcagacgatgtatgaatttgccacatgtgcaagtgcctcttctggtgctgcccatctttactcttggaaccagcttaattttggtactcatccagataccatccttagcctactactcttcctattttaattgatgtaatttctacatatttccatcttagacccttctcccaacttttagattctaactgcctgttggacttaccattggcatggaattcagtacctaacccaccaaaatctgacttcctcccctcaattttctttcttataggtgacaccattacctttccagccatccacactagaaatcaggtgaagtttccagattctttattttccttcattttattctctacatccaattgatcagaagtcttgatgatcttctttttgattatttgatgggagggtaaatgtgtccctcccatctgccaccttctccattcctattattgtactagttaaagcccttgcagttgcttatctggaatatccacaactttcgtactggtttttccaactttaaaactgtcctcatcaaatctgtcctccacgttgatttccttgactatgcttaaaacctcatcattggtctcccatttcaacaggacacagagtctcagctccttagcatgcaacctaagtcctccataatcaggtagtctcctgctggctctccagccaaagcattccttccctctgtcatattgtttatgcagccacacattttccccctgtagtggtggaaaggtatgatgcctttcctcacccatcataagggtcatcggtaactctcctataacaaaagacaggttaacaagagaaaagcataacagatttctttaatcaaagttttatgtgacatgggagccttcagaaataatggcccaaagagccagaggaaactttccatttttatgcttagagtcaatgaagaatggacagccatgtggaaatgtgattggatgaaacgggcatgatctaatggtaatagactaagggggaacccagcaaggcctgtctgttcagattcttcctggccactctttgtagtattcttctttccccctgggtgtgggccaggacccctatggaatgagggtcttatgatctactatcagacaaggtaggtcagagaatttatggtcagcttctaaacaaaaaggtgagggaggttagagcaatatttccaggctttaagccttgctttaggataagagggggttctagtttctatgactcaccttgggaaggaggaatcctggtttctatgattcacttcaagggagaaagaagtgtaggagacaggagggcaggaaaaggtcagagaatttgcttctgaggctgcttctgaggccttccaattcctttagttcaaagtcctcagcatgtcaaagttccatactttgggatagcgttttcatgactttgttaatgcttgtttctctgcctgctgtgccctccccaacatagttaactctcattcattatgtgaaacccagtgcaggccaggtatggtggctcatgcctgtaatgctagcactttgagaggccaaggtgggagaatcgcttgagtccaggagtttgagaccagcttgggcaatatagcgaggccttgtctctaaaaaataaataaataaataaataaataataaataaataaataaataaattagctggggtggtgcgtgcctgtagtcccagctacttgggaggctgaggtgggaggaatgcttgagcatgggaggttgaggctgcattgaaccctgattgcaccactgtactgcggcctgggcaatagagatggactgcatctctaacaaacaaacaaaacaaaacaacccagtgcagacagaacctacttaagaagccttttctgacacctcctttacactgggcccctcttggtgcttcctccatgtcttgcctctctctccaccattttactcacattttattgtaatggtttctttgtgtctgtttccttcaccagactgaacaacttggttgccagaactgcatgctatttacctttatatgtctagtaccttgcacagtgcctggcacatagtaccatttagttaatatgtagctgaataagtagatgaataaatggaaaagacagccattgtgtatgtgctagtagcataaaaatacaggatacacaattacatttcaaattcagataaataacaaataggtttttttagtatgcatagatcccaaacatggaatgggacatacttataccacatagtatgtaattattcattatttctctgaaattaaaatttcactgggcatcctgtaatttatctgtcaaccctaacctagcaaaaaagtgacttcgcacccaatattaggttagcacaaaggtgattgtgacaagttttggtttaagttttgttaagtttgccactatttttaatggcaaaagccataatcacctttgcaccaacctaataaaagttcacacaaggcagaagctcatgttgagcttgacatcatgggccctaaagtattttctagactttaccttaacatctctgagtgtcctgtgtgtaaatagtcactgtagtactcaggtgtattggccttgtcatgttctgctgggtgtcattacatacatgatttctgctgagagaatgatgcaaattttgttgcatggcaaagaaatttatgcagttgagtaatatggagagatgagcagagcttatttgtgagtcagcttgtgggttttcctatacaggtggagtatccttaatcttaaaaccaaaattcaaagtgctccaacatccatgcttattgcagtgttttgcagtttggattttcagaatggggatacttgaatggtaagtatagtgggaatatttcaaaatctgaaaaattctgaaatccaaaccactttcagtcccaagaatttgagataaaagatcctcagcctgtattgtggtggtttgttgttgctggatagtggttgtagggcatatgaaaaggaagcataaaacttacttttggtgtttggggatgaatgtagggattgggtgtgggttttagatttttggagggagttaacagctggaatagtactcactatttactttgctgctcaggccaagatgcctgagaactgatatactgaagagtgatcatggtgtggaggactccatactgtctccatcctaatgaggttgtttgcttaacacgttccctgttaaactatcagatgactgaattattattttgattgaagggactttttttttttttcaaattagaaacacccaactggttaacagtttatgttttagaaggtgaaagagtttatttttccatgactggaaacggaattgaaatatggcatctttcatctctcacatgccctttttcctctccgtctcatgccaaaatcgataattatggaaattacctggtaggacacttgggcacagttttagatatttaccccataggactcagacatgttctcttagaaaaagctggattctaaaggcacaaagatcaaccaaaaaaacaaacatgaaacatttttgtggtcacagtaccatgatcttgtcagtaaagcgacggtctatgattaaatccagattgagctgtttcctgttagcgtgctaacccacaggacaggctcaggcctccgtgtcttgctttctaagtctgggttattaagcacttgtctgacaagggttccacccctttcgtcttcaacttaataattcaaagttactaagataatataagcaaaaacaggtcctaaagtctcttaaaacacttacagacctataggaatcttttcttgcaaaaatgaaacttttaacattttagcttctcttgtcgggccatatggcagagtattttttgtgtttcccctctgtacagtttcatttcaaaataatttcagtggtaagcagatcattttaagtttttgtttcataagaaatgtactctatttgaatgttggcaaattagaagtcatcagatctttcccctgccataataagcaggtattaggatatttagcagttctacagaaaatgacattaagcaaattctctgataacttaacatgcattgttattttgtgtgagaatgattgtaggcacaagagcaattctatacttattttatgatattgtcattgatgttcactttgaaaattattttttaaatctaaattttcaaaatattttattagtcttctgttaggtcatatgtggttcttcctaatgcacagatgcaaaccctgaggaacaaatactgttaaagggacttacgggaatcatgtatgcatattgaaattttttccgagtaagaaagtactgaaagagaggggctgggttaatgagaaacataattccattcccaagggagaaccctggctttctgccaaatctctgctttctggcaggaaatgggacccacttcatcaggtcctttgacaagcatttttctctgtgtttgaattttgggacacgtcaatactcggtgaaaaaatagttcttttaaataatcatcacttttgataagaaggatttagaattaaagtagagtttccattgtaagtaaaataagaatcgtcaaatttcaacattgtttggtaagggaacactgttattatcacaaggcgaggaagcttgatttaaatcagagtttgactatccctaaccactgagaagccattccttttattgttgttaatatttaacattgaagtatattttcatgtttttttttgtttgtttgcttttgagatggagtctcgctctgttgcccaggctggagtgcagtggcacaatctccagcccactgcaacctccgcttcctgggttcaagtgattctcctgcctcagcttcctgagtagctgagactacaggcacgcacattacacgtggctgattttgtatttttagtagagatggggttttactatgttggccaggctgttcttgaactcctgacctcaggtgatccacccaccttggcctcccgaagtgctgggattacaggcgtgagccaccgctcccatcctgaagtatattttctaactgctacttttgaatatcatgcaggctgacaattattttggccaggtcttttgaagtgacaaggtacaaaacacaaaacatcctgacatttttgtattaataaagagatcaaaggaatacacatttgaaaataaaaattaacattatattttataatgttttgatttttcttttttaaatgaaaagtggtaaatatgagttaagttttaaatgcattacagtaatttaataagccaaaatttttcaaagtatgtgcattctgaagttctgcaagatgctctcagactaaagagaaatccatctggaaatgctgcataccatacccctctcttggagttgaataacaccgttggcatatgagaaattctgcagtaaagagatatcattgactttgttgaactctatagttcccaaacttgaccataggagttttttttggaactagtgttttacggcacacacttcaagcaacagtgaaccaaataattaataacatgtagaattctaaaccatatatctttttcacttattgtttctgataaagttaattggaacttctggggaacagatgggtactacaaggtttgttctaaaactacatatagagtgataaagaacagctattagaccctgatctgagtcaacagtcttaagaggcctaaagaaatgtttgctattttgcctgaaccagatccctctccctagaaaactttcagaaattaaataaagagataaagccatctaccacataagctggagtcttaattttaattcctgttagcggtttgacatgatgacattaagctattctaacccccttctgaaagcagttgccaccactctggtctttctgaaagcaatccatctgttagtttccttccagtagtttgatttctgacaggccaggtgaaggaaaagcaaacatgctacttagtaagcacaatatcatcattagacatccacttctttcttctttgtgtctcttctttaattttcacatgtgactatttcaatttaggaaatctgacataaaacaattcaacttgcgattcagataaaccgcctggcgattgttcgcatcacttaggattatttttgctttagaaatagacctcctctctttagagcagtttccttagtgcctatgaaggatgagttaaactttcaaaattgcatctctgtataatttgttaggcacagatttactgcagaatgtaaggcacaccaatatttttcttcattttaattctcttcccttatactcaaattttaagctgtgaagattttattaccaatgaatttttatgtattatggtttatatctaccaaggtacaattatatctaccaatattcatttacagtttcattttcatgtgctagctgcttctcgtgagtaaatgtcttcttttagactttgcaagtttccagaaggcagggtcatacacccacccacccttttcatcactccccagagcttaacccagtggtgcttggtacaaccattttctcagtcagctctgttgattgctgatgatattgaatcaaaatgcacattgccgtctgtggactgaagaaagtcagatcatgattccatctccatagatttccacggagaatatactccaaccatggccagtttttcaagctatcaacatgatttcaactggctcacacaaattcttaaaatttaacaatcctctctccaaaaccagtatgactcagctccagcactccaccataggagctgtctttaggaatgagtgtgcaaaaatttttttcccattctctaggttgcctgttcactcatagttcaaccattgtggaagacagtgtggcgattcctcaaggatctagaaccagaaacaccctttgtcccaacaatcccattactgggtatatacccaaaggattataaatcattctactataaagacacatgcacacgtgtgtttattgcagcactgttcacaatagcaaagacttggaaccaacccaaatgcccatcagtgatagactggataaagaaaatgaggcacatatacaccatggaatactgtgcagccataaaaaaggatgagttcatgtcctttggagggacatggatgaagctggaaaccatcattctcagcaaactaacagaagaacagaaaaccaaacaccgcatgttctcactcataagtgggagttgaacaatgaggacatatggacacagagaggggaacgtcacacatgggggcctgtcgggggtggggtgacagactaggggagggatagccttaggagaaatacctaatatagatgatgggttgatgggtgcaacaaaccaccatggcatgtgtatacctatgtaacaaacctgcatatgtatcccagcacttaaagtataatttttaaaaaaaaaaagaataaaaaactccaacaacaacaacaacaaaaaagaatgagtttgtccaggtgcagtggctcacgcctgtaatcacaacacttttggaggctgaggcgggcgtatcacctgaggtcaggagttcaagaccagcctggccaacatggtgaaaacctgtctctcctaaaaatgcaaaaattagtcgggtgtggtgatgggtgcctgtaatcccagctactcgggaggctgaggcaggagaattacttgaccccaggaggtggaggttgcagtgagccaagatcacatcactgcactccagcctgggcgacaaagcgagactccatctcaaaaaaaagaatgagtttgaaaactttccatggaacaaaacaaagggaatgcttgctaaacctgatcctggtatcattaaaaatgcgcttggtaaaattatatcagcaaactagttcttgataggggagtaagtagaagcaaatgtaaccattatgaagtaatacctctacttctagaaaggtaggaaacacgcatacctccaccaccaccaccctaccacactaaactcataggagagagcattgccttatatgacatgtagagaaattaaataagagtgagggtaagctgcatgcagtggctcacacctataatcccagcattttgggaggccaaggcgagagggttgcttgaacccaggagtttgagaccagtctggataacatagcgagacactatctctaccaaaaacaaaaatacaaaaatgagcagagcatggttgcctgagcctgtagtcccagctacttgggaggctgagtcaggaggatcactcgagcccaggagctccaagctgcagtgatctgtgatcacaccactgctctccagcctgggtaacaaaagggataaataaataaataagaatgagaggaaacataacaggctatggccttcaactatttcaatgcttccaattttactttagggagtcatttctccttatggtaattgttaatttattatacaggttgaaggggaccagctgcctccaggacacacagtcagtcaatatgaaacctgtaagatcaggaccataaaagctggcaccttggagaagcttgtggagaacctgctgacagcttttggggacaatgactttacctatatcagcatctttctttcaacgtacagaggctttgcctccactaaagaagtgctggaactactgctggacaggtaagaatgtaaaggagcttttgagttgaaagaaatgtaggctgattatggagtggagcacgaggttctgaatcacctgcacttggtattcggagagagatatgtgaggaaagattaacgggaagggatgacctttggcacaaatgaaaagaagatcattcaggagccacttatggtctgttgctggggaaaaatatctcctaaaagatttataaaagagttgagagtggataccttaaatctagattcagttgctttatggatttactatttgccaccctaaatttctccatatttttataattttatattattcagtaaataatcagttgaccaagaattttactgggatgttgtggggatgaaatgtgctaatatgtgtgaagtgtggagctcattcttagatccacaggaagcagcttaggaatggtggcaatgatgatgcgatgatgatgataactattaacagtcagcatgtattgactgttttaaggatctgcacataaatatccttgatccgtatttttaagctacttattacatagagcagtatacattgatatttacacactgttaaactttagattttcctctttatttctgttttatttagaattaaacttggtcttttagaaaatatcattaaatcaacttgatactgggaggaagaaagctatcagccaaacaattgttttagaatcaggagaatcctcatctaaatccttatattctggggtttcctgcataaggaaggaaatgagatacggctttctgttgggcttgttgagtattgatgtttgttaactaaatttttttattttgaaagtaatctgtgctcatgctaaaaattcttacactgtggaagaatatgcaaaatattaaagtttgttcatattgctgccttttccccaaataacatttattagatttaaaaatattagtagtaagaagaaaattaaatagaccatcaactaggcaaataacacatattaacattttaaaaatagaggtaatccatgtatatggtgaaaagttccatcagcccagataattataaaaataaaaagtaaaatatttttttctccaagctccaatcccattcctcccaggaaatcactgtgaaccatccttttgtatttttcccacacttttgggtgtatagaaagtatgtatgtatatatacacacatttatgtactgtatgtcatatatatgatatgtttatatatttatcatatgacacatatacttacctatgatacagatagcatcacagtacatagtctgttctgcaattttcatttaaaaaatttttttttctatttttagagataggatcttgtcctgttgtccagactggactggagtgcagtcacacaatcatagctcactgcatcctcaaactccggggctcaagagatcagcctcagcctcctgagttgctaggatgacaggtgcatgccaccacgcctggccaattttcagtttttacttatctgcatatcttggaaattttttactcattaagtgaattagtatatataaaaggcttagaacagtggctggcatattgaaagctcaaaaaatgtaattcttatttcaaaaccagcacatgtagatgaatctatcataatcttttcaatagctttataatatttattgaatgggttattatatggatagacatttaagttttctccagtttttaatttttttttttttttttttttttgttgagatggcatctcgctctgtctccaggctggagtgcagtggcgtgatctcggctcactgcaacctccgcctcttgggttcaagcaattctcctgcctcagcctcctgggtagctgggattacaggtgcatgccaccacacccagctaatttttgtattttttgtaaagacagggctttaccatgttggccaggatgatctcgatctcttgacctcatgatctgccgcctcagcctcccaaagtgctgggattagacttgagagccgctgcgcccggcaaatttgttttttaaactttgtaaacagtactgcaaggagcatttttgaatatatatcttcggaatagttggttgagaattctataggataatgtcatagaagagtcactaatgggtcaaagtatatcagcatttaaagatttgaaagataactgccagattgcaccagtgacattcctgtccacagaaaacgggaatgcctatttcctcattttccccacactcttgccaactgtggatattttctctctacttttgaaactgtctttgccatgacctgaccactgacaaatgatagcttcttgtttttgaatttgtgcttcttacatttatgagtgaggtttagcatcttttaaaattcttattggctgtttgtgttttcttttctgtgaactgccttttcatatccttttgcctatttttcttttggactcttttcatctaattattgattatctaattataactctgcatattaagggaattagtttgttgcttatcatatgttagaaatattttcctaatttttccattcgttttaaaagttatttattaaaattttttataacgacattaacattttttgtgtagtcatatctattagtcttaagaaatacctttaataatcaagttatattccaatataagtaaggttattgacaatagtgggttttctctcaaagtagtttactcgtaagatgcatatagagtaagattatttggatcaatggttattaatatgttaatcttcaagaatactcacaaaatgtctgttctttgtcatacattgatctggattatgatactttgagctgcagcacagataggaagttctgtagcttttttcatagcagtgcttgacaaaataggcctggaatataaacttggattggtgaggcatttctttatataggcaggatcttatgtaatagatcatacctgtaagtagaaattgaaaaattatatgaattttatctttttggtatttcatgtttataaaaaaatgcagtatgctgttggcaggcagtatgaattgactgttcaaaacgttaaaaaactcctacaagtttactttggaattggtaacctcttctatttatggggtgactattgataataggccacagatatccacagtcaataaaggagtgcacgtaaattccagctgttcatcctaaatagaggacatatacacacaggaactggagtgtttagtctatgactcatgtacatccagattttgatattttttaaatcttttctttgttctattatagaggatagatgtttttgctttttaaaacactaactggatgactgactaacactgaaaatgaatcaaactgcatttaattcaagctgtcatgtacgatataactggagagttaggatttatttttttaccatttggatgggccaaggcttggccttgaatttaatctcataaacagatcctttgcttgcttctgaaatgaatggaattgacaagtactcaatgcctacacaatacccagcttctgcaagacaccatgcagatggaactcaggaatatgagacttgtttcatgccttgagatagtttagaggtagatttactatgaagccactggtacttaacctccaggggcgctcacttggaatgccctctgcataattttatattcatgattttgtattctttttctttgagaggatccctcagattacatatggcttcaaattacatatccataagacctggatccacccctcagtacttaatattttactgcaaaagataacatattaaggcttgcatttctgaaacaagtagataactgcttgagatggtattagatgaagttctaacatgttctgcagatgaaacaggatatagaagttcagaggaataaatatcatttatttagattattctgcagaaattgggatttgttcaaataagtacaaacctcaacatgagtatttcttccttgcttcatttcctactcacacttagatcttgagccaggcttcagtcttgattaaatttaaccaaaatgcacattctgtgaaacagtgggttcttaaattggttgttgagacttttaatgtctataattaagaggaagcaattatgttgtataaacttgcctattctgaagatgagcatttgaaatattattttgtcagtagattgtggtagacttgtttatgggtctctgacataattttaaaaataatttcttttggtttcttaatagtagtttgcttatctgttgtgaaattaacactgagaagctattacagcatgtgctaatcatacaataatcagtcaagaatagattgaagacagatactgcagtatttatttcccaccggagaagcttatttgatgtcaagctttgatttcccttaagacttctaataatgtgggttttctcatatggaactatttgctttctgggatttattttttatcttttgacagttttttattctgctataatatgagccttttgtgattggccaatagacagtggtttgaattcacgtatagctaattccgtgtgtttgctttaccccttacttggggtgatcatttcccaaggacccctgtttcctgtgcttctcaacatggctcagagtccacattggcctacttttaacccaagagaaagttcttgaattctgggccagcagtttgtgttggggctttgagattttcttttatctaacttcaaacatacactcactcagttaaaaatctggccaggcgtggtggctcacatctttaatcccagcactttgggaggctgaggcaggtggatcacctgaggtcaggagtttgagaccaacctggccaacatggtgaaaccctgtccctactaaaaatataaaaattagctggtatggtggcaggcatctgtagtcctagctactcgggaggctgaggcgggagaatcgcttgaacctgggaggcagaagttgcagtgagctgaaattgcaccagcctgggcgacacagtaagacttggtctcaaaaaaaatcatctgttctctccaccataccattttaaacataagggtgttagatactactgaatatgcccaacctcaaatgtagggagaaacctactttaattagtgaccttcagtgagagccatgaaatgttggcacaagtatctagagttttcttcagatagctgtcacaatagctcccttttgggccatttcttgaacattctctctttctgtgttatgcactctaatatcagaattaagcagaatgagctgagtgcagtggctcatgcttgtaatcccagcactttgggaggccgaggtgggcggttcacttgaggccaggagtttgagaccagcctggccaacaaggcaaaaccccatctctactaaaaatacaaaagttagctgggcgtggtggtgcatgcctgtagccctagggagggtgaggcaggaggataacttgagcctgggaagcggaggttgcagtgagctgagattgtgccactgcaatccagcctgggtaacaaagcgagaccctgtctaaaagaaaaaaaaagtaagcagaatgccaacaagaaccagagtaggggttaactaggtctccagaaacctttgccaagctgatggcactcaggtcacactatggaaagcactgagtaatagtctgaattactcccttaatttcaaatgaattctcccagtggaggacattcggggtttttaaaggttggagccatttgtaaacactatgctttaagattatctgacttaaatttgcttgcttatggtgcagagaagagactaattcagtaggtctttgaacttatttcttcttcccatgtttgcttgccatgtgttttcacaggcttcatctcatttagttcacttatttttacccctatgtttacagattagaaaattgtggctcagaaacattcaatcagtaagtagcagagctagaattaaaacctactcctttctgacttggaagctctttccaagtgtacaatatcaccttccttgatttgttaatatcacctttaaaggaacccttttttgggaatcctttttagccatccttttcactactacctcaagtgattttccctggaaactgtatttcccaagggctcctcccttcacacagttgtgagcagttcacttgagcatcagtgctgttatttgtctactcaagcaatatttatcagctctttaatgtgtactatgtactgtacaagatgctgtgtgtataatggtggacaaacctgccttcttcatgctgaatgtctagtgggaaagagtaacattaaacaaatcagtgtgcaaatacatttatataattaaaattgatagaccactgggagataaaaggttctataacacagagttataaaggatattttggagagctgtacccaaataaaactgaatgttggccaggatcttaggtgatcacttagatcatggcccataaaggtaattgctttgtctgtgtgtttggagtgtttctgtgtactgaatgggcctggccaaatccctgacctcgatcagcttttcctgaagggtcagggatagcaaatgagagagcacgggtggatttaagtaagtatagtaccaccgtgggaacagaaaccttaaatccattctttatgtcgcctggagtaacattttcatatgcaaaacctgacataccaataaccagcaaaacggagctgcctttgttagtgcaaccagttcctccacagtgtagagaggagttgatcagatataaagcttgaaaattttcatttatttccaaggattttgtcatagatgtcaaacagacttttcagaattttaggatacattatgggaaaagcaatttttcctgtctttttttttacccatgagattcagatttaaggcatatagtataatggttaagaacatgggcttaggagtcagaaatttgaattttattccagttttgcactccttacttgctctgcagtattgggcagtgaatttatcttactagcttcagttttcctcatctataaaataacaaaaatagcacctaatttatagagttattataaagtttgaacatgataatataggtaaaatttgtagtatagtggctgaaaaatattaagtgcttaagagattactattaccttgttttctttcttcaaggcatttattattatttgaaattaccttatttatcttgcttatttcatgactgtctttcccactcagagaccatgttagtcttgttcattgctctaccctcaaaatggtgcctgcagtaggtgcttaggaactatttgtctaacaaataaataatggttatcattattcatgccttttccaagcaggtgttttggaaggtccagcagtgaacattgcccagcctctgcccatgtttagtgggagagacaaataagtctatagactcgtgtcatcactgtcaaggccatgaggctgaatgtgcgtttttaatgaaaaccttttccccccgggagctggtagttgtaaaccttctataaaaagcccattgcacacatccattcagttctcaaatgctttcgttgcatgagaagctggtaagtgtttttgagatgcgtacaatatgttccaatttgctttttgttaaacctcacttaaaaataattgaattttttatttagtgctggaattacactaggcacttgccaaatattcctagattcatgctggcatgcagtgttcatgttcctgtacttccttttctttcagtaagaggcaaggtttctaatatctttcctctcctcttccaggtccaaggaaaggaagttgtcaacagagagagcactgggaaacatactggaaactgaacccgcacgacgggtctcagagcatcttcatgtgacttatggtcccagtgtcgcctctagggtcaccagcatctagaggtgacactgagaccataactcacctgtaggtgctggtctcttatagcattaacactcacattaaatcttgttactatgaaactcataatttgatttttttctaaactttttgttctgagttatttattaatgtttaacttccatcacttacataggaaatttttcaaaataattccataccattctcttcattaattttagtaacctcctacagggccaaatcgaaattagcagagagggtcactcattaagtcttttgtgcctcccccaacccacccatgcatgaaacagttgagatttagtggttggtggctccaggatgcacatcccatttatttagtagaaaaactttcaggaaatcttaacattgctttgcttcctttctagcttaacatacaatcatattgaatatcctgactagggtgagaatttcttagtaaatgaaggctgctatttaagatttttgttagaacagatgagtttaaatagattttctctaggtctgggtgttgatgacttcctaggcaaaaaaacccaaaaaaacttggatgggttacacacacatacacatacacacacatatatataacagaacatatatatatatgttctgttatgtatatgaccctctctactagtttccatttggctctgtggggggttactaaaattaatgaagagaatatggaattattttgaaaaatttcctatataagtgatagaagttaaacattaataaataactcttagaacaaacaaaaagtttagaaaaatgtcaaattatgagtttatgttctattcaggacatcatgccctgttcagttttggtccacacactcagctccaggaagcatggctggagccagaatgtgaccagaattgttattattttctccctgtaaatatatatatatttttatatatatatatatgttaaggtgttttttaaaaaaaggtagattgctgaaagataaattggacttagatcttatttcctgcaactatgagaaacatgacactattggttggtagaagagaaaagaggattgtaagaagggtgtgaaaatctttgggtgtgaaaatggttataatatagaaaagagcattaaaaactttgataggggatgcctttcataaaaggtctcaggctcttgctggctcacactttatcaggtggagagaaacagtttagctcagaaaacaatagaaggtataacatttataataatttacatatccaaagatgtccacatcctcatccctgaaacctgggaatatgttaggttatatgcaaaggggaattgaggttgcagatggaattaaggttactaatcagctgactataaaataaggagattatcttggattatctgagtgagcccagagtaatcacaagggtccttaaaaatgtaaaagatggaggcagaagacagagaaagagatacaaggatggaaatgggatcagatagatgctatgttgctggctttgaagatggaggaagggggccttgagccaaagaatgcaggcagcctcttgaagctagaaaaggggattgaacagattctcttctagaacctctagaaaggaacatagccctgacaacaccttgattttaacccattgagacccttgttggacttctgacttacagaactataaaatagtaaatttgtattgttataagccactaagtttgtaataatttattccagcaacacagataagaaacaaggaattcttgtcagggagattgactctgaaaaatctagtggccataggctcaaggatgttgaaggtcggtgtccaccctcacctttgttctgttcaggacatcatgccctgttcagtttcggtccacacactcagctccaggaagcatggccggagccagaatgtgatgggcattgttattattttctccctgtaactatgccagttactttggattaaccagaaaaatttaatctggtgctgtttgagaattatatccaaccataattacctgagggaaaatggaaataagttctcttccctgctgggttggtggcctttggtaaatatttacttttgccaagtggacccaattgtcacctgccaacactatgggaattctggataggaacatgtggcgactgtagagccttagcttgtgggacgacagtgatggttttgttaaagtagacactgaggggatgctgtcaaagactttgcctcagatcatagccaggctagctttcttttcttgaaatgggatttataagacctaagagataaaaatgtttccatgaagtagcttgttttttttatttcacttggcaaagggaggcaaggacatgcaattatcctttttttgaaaagaatataaaattgcccagcaggttttttttttaaagtgtgcttaacatttgtaaactacaaaacaaaactgacaagaaactgaaatgtaatgggtggtaactgagttagtaactggacagtcagacattcagctttgatcatttaaagcagtggttttgaccatttttcagcagttggtgggagtgattgatcacaaacccctgtaagaatgtactaaaaactatggaccttctctttagaaaaaagagaatgtcacaatttttttcataaaatttagggacttcccagacttctgtaaattcatctagagaccctgggttatgatcccctaggcaaagtgtccctagcgtggtaacaggggatatgtaggcagccattatgaatgagaggtgggcactgatcctagctttattataactggaacacagaccttaagtgtggctctgaaaagtaaaccaatcaaattaactaaaattacgcttcatggttcattcaggtaaatttaatggttttagaaagtatcttgggacatctaaaaggggaagatactggtggttttgagttaattttgtttttcatatcgctattctcttatctgaaaattttttttacatttattttttgtgaacttagcccttgataatgctgtcaggcccctagtcctgggaacacaattcttttgcctttggcctctactaaagctaacagtaagcacccatttagataaattgatattccgttgagtttttgtaagctataggcaaaaaagaaaagtattcttgaaaatgaaaggatgccatgatactaaactcatattcattgtatttgatgttacaaagcatgtttcataagattttgaagagctctgcaatagcagctttttgtggttggggaaaactgagccacaggcttgtactgatttgttaataatgtattaattcatcttaaacctgagaaaaatctagactcatgaacagagtctgagtgctgcctccttcctacccccatctaccagtttcttctgttgtccgtcattgtagcctcatccattgcagtgtactaacaagatgtgtttgcagttggtggtttagcattgttatgaactagaagtggaaggagtagctacggatgggccaccaagctctgagtgcaggaaacaggccagagaaaagaaacggatgacagaggcttggaatggaaaatagaagaaaccttatagcaggagtgtgagagccaacatacttaaataattttaaatctgcgtgagatataagttgtggcaggagagaactttttttctttcccttggatgaatagtgtccttttcttgaactcctctttagacagttgtgggttaagggctggaaagaaaggttattctccaggaaaatgttatagcattttgtaactgtcaagtggggcagaaatatcaggtactcttttgctgctaatgttgccttaagtgtcagggacttagtatggagatatgtggacaatgaaagaacaaggaaggtgcagtgtccttcacagcaaaggcctagaggtgaggagggcagcttttgttgggtcttctagctttttctagtcagggaaaaatggcctagagaactaaccctcataaatggaaagcacagtatagggttctcggctcaatcttcttggccccttcctttcctgcaagagaacaaggagtttttgccttgttgtttttgacctttgtctttccccttgaataagtaacttcacagtggtaacaagacctttccaaggtaggcttggtggctgtgacccagttctcaggtcagacttggcggagaggtgcctgccatggaggatattattcagagtaattaaaaccacacttcttgctgatctgtggaaacagtccaaagtcttcactaaggttttcaccagacatctgcaggctatttcacccatgtcgttctcctgagtcaaggtcagcttctgaacatttttttcatacctgacctgtgttcttttgggtcagttacagaaaaatgcctaagatgttctgaggccagcatttattagaaaagattcccaggagtccttgagtcagcagcttcatgtgaggtctctctttcctttacttcttcctttccgttctttcactatccccaataaagtacctccttcccaactcttcccgccccagcctttcttttattcgtggtagaagagggtgtgtattaattcattgagcaaatatttattgtctactttgtgcaggctctattccaggctcagtagaagtagcagtaagcaaaatagaagagtaaaaccagagtccttgccacagcctacctaccaggccctcagcatctgtccttgtcatctccatgcctccttttctattcacgctcactcagctctgcccctcattggcctcttaatgtttcttagaaacatccttctgctactcttccaaggcctttgcattggctctttggactgcttagaggctctttccctggagatctgcagggcccacttcctcactttctggagagtttacttagttttcacattcacattgggccttccccaaatacccaacctctggccctccattataccaggtcaccctgacctgctttatttctctccattgcacttttcactctctgacttagtatatattaactaattattgttgtctgtctcctccgcactaccatgtatacttcatgaaaacagagactttggtttgtttgctgctgtatcctcaatgtctagaatagtacctgtacatagtccttagtaaataatcctcattgaatgaggactaaatgagtgaaagaatgaatgatggaataaatgaatgaaaggctcaccatagcttgtatggtagggagtgattcagaggctggttgctgaacgctgactgtcatggctgaaatccctgctgcacgtattagttgtatctttgagggcatgttacttaatttaagccttctgggcctcatttttctcatctgtagaataggaataaaaataacttcactctatagaattataggagaactaaaccaagccagcatgtaaagcccttagcacagtacctggcatatagtaagttctcaataattattaactgctgttattattggatcatttgccagaatcaagcagagcctgagagattcttcaggatcacccgcctcctgatctggtgttactgagactttcctgttggggagcaaaggttagcaagggcccccactagagagaccgtccctgggtacaactttatctaagggtttctttgaaccacagatacacctggtcttccccttcaaacacatataaaacacttcaccttaccagataggctacaaagaatacagacatcctctctggaaataactgtttctgtttaaatatttagcaaccagttaaacattgtactggttttttctttcccttttctattactttttaggctgcagtaaataattgcttaaggctgcactttaggagacatttgtaaatttttcttttgccttgtgataacagagaaaaccatgtcaaaagtcattctgacaatttttattttaagttttatgagttaccatttaaagaagagcagttggtcattggtaagccttcttaagaggttggagctttgatcttaaatcctagggaggctttgcagaaattggacacgacatcgttgacaggtttgttggtagctattctatggccattaattaaacatacacactcatacacacactttatttactaccctggaataagtgaattgaacttgactttgagttttgatgggaagctatgagagggtccaggaaaacatcaaaggaaccttcttaatctagtagtactgactgtcaaaggacctagcctgaacatttaaagagttctggattccaacactagtctagtttcttttctgtaaagcagtaattctccttaatgataagaaaggtgcagggatggcctggcatgttggcttatgcctgtaatcccagcactttgaggggctaagacgggaggatcacttgagcccagaagttcgagaccggcctgggcaacagagtgagatctcgtctctacaaaaaataaaaaaaaatagccaggcatggtggcatgcatctgtggtcccagctagtgcctgtggtcccagcctctcaggaggctgaggtgggaggcttgctcaaacctagaaggacaaggctacagtgagccatgactgtgccactgcattccagtctgggcaagagagtgagaccctgtttcaatgggaaaagaaaaaaaattaagaaaggtgcaggggcaaataatcatctccatcccagtccattaagttccacaaggttacaggctctttccttttatctcacttctaaaagacttctttggaatagcgtgtatacttttgttttgcattttaatagtttttacctttaagatctcaactttaacatcttaaaactttttttctttttaattgtagatttttggaataatcacagctatcttaaaacttttatgctcctaagcccttagaagtgagggcttgatacttgtagaagcataaataaggccagatgatgcctttgcagaggcaaatctgaacctagtagttgggaggtccattactgcgtctgcttctgaaaccccaatagagcactagcaacaggtagctattgcatgcctgttgggtgccaggcactaaagagttgggtgccagctctaaagagtagtgagcaaaaagaaaacatcctggtatgctggagtttattttctaatggacaattaacacaacaacaaaatgaactacacagtatatcagaaggtattaaaagccatagagaaaaataaaggagggaaggggctgatgttacagttggtttgtattttaaatagggcagtctgggaaggcctcactgataaagtgatacctgagcaaagacctgaggagctgagagagtgagcccttggcacaggtgtgggaggaggcagcagcaggcacagattcagaggcaggaggatgcccagtgtgtgggtggagcagggaggaggctggtgaggctggaaagggagtaagggctgaggaattgtaggaggcgtgggaggaggtctctgcagatcattcagggccttgtgagacacgtaagactttcgccttttctcagagtgagatgggagtcatgggagggtttctccctttttcttttttcttcttcttcttcttcctttttttgttttttgttttttgtttttgagagacagcgtcttgctatgtgttgcccaggctaggcttgaactcctgggctcaggagatcctcttgctgcagcctcttgagtagctgggattgcagacatgtgccaccatgcttggctttttatgggagggttttgagtggagcagtgacatgatctgatctacctaaagcagaattgctctggctactgggcagaagctggggaccatttaggtggctgttgtattgatttaggttacacttgatttacactatccaagatagtgtagttggagccagggtggaagcaatggaagtgatgagaagtgtttggattcaggatatattagaagggcagagcaaaaaggatttcctgatgggttgggtggagaagagttagtatgtctgcaagatttgagcctcagcaactggatcgtgtgctctgccacacactcctttttatccatggcccttattggtgtccaagttattatcaagcagtcactctgatcccaattgagaaactgtagacactctggtagccaggagaaatacttctgtggtcttctgagccattgctcagaagatgctaccaggttagttaatgagagagaacttggctcaccagtataagttacttagtctttcttgacaccttctcattacacatttggcatcacattctggggaggaactgtgatagatgttggtgccatccaaacctgcacctcagctctgagtctgaagaatgcaggaaaagagcagaagagtaggaggagctaaagcaaagataaagaatagagagatctggaaacttgtagtacaaaccactttgaaaaaaagactatcaggagcagtaaaatgtgtatctttccctggtgttttccctttttatatctacctttcatagcttccagttgaaagataaaaagatgtgatatttccacaataactggagtgggaattaatggactaacatggaatgtaacaaaaacaaagattaagtcccacatttagtaattgagagatggcaagagaagagtttatggatccttctagtcagatacatagaagatacactggctttccaagatcccactcttgcttgcacccaccgtaatctctcctacttaaataaaccaccaagcctgctgtgagagagtacgaggacatagtttgctacgatgttggccaagtatagagctgaaaaatctcaccctgtttatttattaggaatcttgttttccatccttgccttgctcatgtggggctgagtaaatcttaatctgagttcttatctcaggaagagcaaagggtagccctggaagccttctaaatagcaggtgcaggacagaatgaagaggaaaagagagggtggagaccagtggaaaatatctttgagaggccaagaaatccataaggctgatgagctagagaaaggagcaggtggatgggtgagctggtgcctaagggcgcaaactggaacctaccgggatgggatgatagggacaccagatggactggcgttgggtcaaaccagatggtgggcttttatttttaaaaggatttgtaagtcctaggaacaaggaaccataagggtactgggcctttaatcccattagtagaaaacaaaagtgtgctctttaaaaatgtaaactcatcaattatagaatttatcaaaactttgggacagactactcacttgtgaaaccccaaggaatctctggattctgtattgatggaaggagaaactgaagaaatagtctaggcattataagttaattaaagactcctccttaataatttaaagtgcgtttactaagtttacattccaaaccaaacaaaatatgatatatttgtatgaaataggctggctcacatgtggagttgggagaacagctagcagtgtaagtagggactgatgaattattgagtaaattttgagttggtaatgagaaaatttttaaaatttaagcatctattgctttcccaaaaatcagacccctgcaccccacctccccagttgctgtgtctagcgcaacctggcctcagtatagctacagctgctctcctggttgctaagacatgagagcttctactgtagtccttgtctctatcccagccttaattttagggtccagagctatttccataatccctctacaacggacttattttcaaggagaccagactcttaagtgtagcctggagccatcagtttgtgctcccatgtggcatgagtgtggatgctgtgcctgcagagccatgtgtcccttgcatagacatgcagaggggttggacgggagggtttggtgtgctacagagttcatgaggaatctgccttcttcgtattatgtaatagccgattctcctgctgataggaacactctaatctaaaaaagtcaataaatgttaagtgttaatattaagagaaagttttaagtagtgtgattagttgttaaatgacttttctgtttagaatatgcagatatatccattaagtaactatcaataatactgcatcattttcaatgctatttcatagatatatctttccttaattacttctgaaaagtataactgtcactttgtagttgaagttgaatagagttgctttccaacaccactgactgtttttgcttgcttgttcattattatctctacaggtatggaaacctgacaagcccaaactgtgaagaagatggaagccaaagttcatcagagtccaaaatggtgatcaggaagtgagtctcccttttctttgcattctaagctctcagtcaagacaatatcttaaagtagtttagtagagtattttattcctttgaatgttgccatgatttttttttccatagtgcatacagaggcttattttttgattacctaacaatattcatttatgtatccagtgaaagtatcttaagtaaccactgtctgccaggcattgtgctaaggtatacaaaacaaacaagtgaagaaaacaaacgaacaaaataaacagtcccagctcataaaaagtgtgtattttaccagaaagagacaaagaatacacacaaaaaagtgaagaagaatgaagcagggtctgagggctggagcgtttggctatgtgtagggtgcccggattgggctgtctggtctgttggcattggagcacgccgaaatgaggtgtgccctgagccttgcaaatagccaggccgacagaccacgggaaagcctctgaggcaggagcggtgtttgagaatcagcagggaattgcatgtggccggagcgcgtgctaggggatgagcactgtgaggtgagcaggaaggtggccactcacaaggggactcatagcaacttggggaaagatgttgaatttgattctgaggaagataagaagcgcttagaaggttttgagaagagtgctgtggcctgacacatcttaaaagacccgctctggctctgtgtccggaaagtagcctgtggcagtgtggctggggacaagggtgggagcagggagcctggtcaggaccctcccaagagtccagatgagggctgcttgtggtgcgggctgaagcaatagcagtgaaggtgaccagcctttgcagagatcttccaggtgttggtggcaggacaagctggagtgcatgggctgtgtgagagaacaagaggaggccagatgcttcccagggttgcggtttgagcagcggagagacagaaccttggctttataaaataaggaagatcgagggagcaggtttaatggggagtgtgtatcagaaattcagtcacagacataattagctcagtctagatttcagggagaggcatggaatggaggtataaatttggatgtctttagtttatacatggtatttaaagctatgagactgaatgtggcttcctgggaactaagggcagatagaggagagaagatccagagactgagcctggttccttgggtgtttagagttagggaagtagagcgtctggcagaggagactggaacagagcagctttggggaaggatgggggaggagaaaaaagttgttgtgtccccagaagacaagcaaagaaaggatttcagggagggagtgaccaactccctccagtgctgccctagatcgagtgtgagggtctgaaaagtgactcctcctttgcagtgctgcggtctttggtgacttgacaagtgcagtttggtggatggaaaggtgggcaagagagaatgaaggggatgaagtggggacagtgagtcttgttagaggaggagctttgctgcaaaggggaatagagaaatggatggaagatgggttttttttttggttgtatatgtgttttttaaaagatggaagatattttatgctgatgagaatgtcctatgagaaaacatccatgatgcgggggtgggggccattgtaggggtgatgttcctgagtagatggaatgtgcacctgggtgcctgaaaccactagtgttaaatattcattttggggccaaaagtctggggggaatcctgtggaatttttaactcctcagaagagttactgatagactcctttcttcaggagctagggatgtgaaagtaggaagctgagtatcttttttaactcctgagttaggttccatgtagttttacagttttattcagtggatcataactttccagaaaaccagacataccagtgtaggtatttgaatgtcaagcacaaggtacagtgggaggaacaattcttttgtttttagaagggcttggggaaggcctcttggaggaggttacctttgatctgggccctgaagcatggtgaagattttgttggtagagccgtctgggtataggaaacagtgggaccaaattgggcaaatgcaattttcatggaattttggggaacaacacagaattggtgtggctgcttcatagagtacatgttaggtgagaggggagtcagtggagctgaagctagattggacttacttcatgaagggcattaatttcttgcaggagagtttggactttccctggtaagcagtgggcagtcagcagtaatgaatttttataggagggaaacaatataatctaaaaggtgatttttcagaatgggttagacatagagccttctcgctcaaagtgtgaccgtggacctatagcatcagcatctcctgggtgggagcttgtgagaaatgcagactctcaggccccactcagacctaatggattagaatctgcattttaacaagattctcaagtgattcctaagcactttagagttttgagaatcataggagtctatgaaaactcactaagataatgatttttttagaagaacctttttataatggacattttggagcatatacaaaaggagagatactgtaagaattgagtgtaatctagacttgtgagcagattcagaaatagacatgttattatacacatattttggaactcagtccaatctagagctgccattcaattagccacctgaacactctgaggagagtcacaatcaaaaatatccagagctggccgggcgtggtggctcatgcctgtaatcccaacactttgggaagcccaggagggaagatcacttaaggcaggagctcaaaaccagcctcggcaacgtagtgggactctgtctctacaaaaatttttttaaaaaattgctggatgtggtggcacatgcctgtagtcccagttacttgggaggctgaggcaggaggattgcttgagcctgggaggttgaggctgctgtgagccatgatcgtgccactgcactccagcctgggcaacagagtgagtgagaccttgtcttaaaagtaaataataataataaaaaaatccagagcttctctgtcccatgaggtgttttgagataaaatagattttttgggaagtagcagttaagaaaattgcaccctgggtatgaagagtcatgttcattcttttaaagtctcattcgaattcgttgtatactaggaacactaatgtgaatgaaactccaagctaagctgttttaaagagttttagagttttaagcatatgagggcttaacaaagagcttcacacagaactcccctgaggggtccatcctctggggacaatggtcctttcctaaagtctcacaataacttggtggaaagttcttgacccttttgctcagactgagttgccttttaaaaaattatgcctgatgaaaatatgccactttatcttataatgggtcgctctgtcctacagattctggaatgttaaaatcccttcttactggtgacctctttcttccttccatttccctttcttctgtctttctcactgttttttccccacatcttttattgtttttcatctcacttcactattattttttggctctctttttctgaaactatgcttctcctgatcatttctgtgcctagatagggtcactgctttgtctttgtctttgtgagaggaaatcagggaagcatcttctcccatctgtatgtaatgtattgcaaatttcctggtcatcccagacctctggcatctgacttgcagcaatgattgagggcttcctgatgatcaatagatgtgtaggaggtatggcagtggttctcaacagggcgattgttatcctccagaggacatttgccaatgccctacagacattttggttgtctcaacttggtggggggaggctattggcaactcatgggtagaggccagggatgctgctaaacgtcctagcatgtgaaagtttcttgtattggttcgaaccctaaaagcatgccaacagacaacacaaagcggtgtggagcaacacactgttttaatgagtgcctgggtgcaggcgggctgagacctaaaatgacatcagccccaagtgaggacgggacaggggctttgtagtcctctgtaaacaggaagtgtcccagtctgacgtgactgctacgtagtacctggacggcctctttctcggtcttcaggggtatgtgtcttccggccagggtaggtgtcttccggccagggtagttgtcttccggccagggtaggtgtcttccggccagggtagttgtcttccggccagggtaggtgtcttccggccagggtagttgtcttccggccagggtaggtgtcttccggccagggtagttgtcttccggccagggtaggtgtcttccggccagggtaggtgtcttctggcccgctgtcttcctgcttctgctatcttgctgacgcgtgctgctggcgcaagtggccttgagctttgggactgggcctgagaagggaggagttactcatcccttcaagctttcgggcccgggggagaatctttcagcatgcacaaagtaactctcctctaccccaacaaggaatgatctgaccttaaatgtcaatagtgcctaagaagccctgctatgtagtattgaggctctagttctcaagtgaaactgtctttatgaatacctaacatacataaaaataggagcaggcctatttggaaatttctctatttgtgtctctttttataagtagctgaatcaaatgtggaagtgattcagaggcagccacatggagagggaaaggccctggtgaaggagcctggagaactcggatcctgctccttctctatcactctgtcacttaccagtcatctgaccttggcttagtcccttcacctccctttgtttcagtttcttcacctgaaaaatgagtgcttggagtaaatgctcgctgaggtccttttaagttcagtgatgtctaagataaaatttatttagctttttctttctctcaaaaaatgaataacagaaacagagatatggtccacacagcatagtggacttttgagagtacggtaccttcgaccacttttctctgttggaaagtgtgttaccagttttgaagagacaggaagaaacacatacacaagctttgtttgttattagtcatgacatcacagctgctcactggggtcatgaataaagagctgagctaaagcattgtcttgtgggagtaaggcaaggagtggcaaaatgcccattgttttcttttgctatgaatctgttctcttgtgatttcaggtggaaaaccgacagcaggaatccaatgacattcaggaagtaaacatcctgtttagggcagttgccttcagttttgcagacctgggtggaggaggggatggggacagggactcactattggatttaaccatgaacagaaaaatgcccaaatattgtttgttttcccgttttagctgtaaagcaaagagcaacccttacattttatacaggctcccaagtaccaagtaaaatctttcctgtatttccaaatatggatttaaacctttcagagggtaaaagaactttaaagaaggaaaatgtggaaatacagatgaagcattcaagatgaaaaattggtttctgatgtcttggaccacaaccgactagtgttcttcatgcatttaaaaaagtatcagattgtgcagggactcccacatgcggagtacttgtaattccagtccagagttcaggctttgcacaatgtcaggaccctctaaagttatctggctaagacaagaatgtgttcagttgcaaaggattcaacttccaaggcttctggatgttggaatctttgcctcacggtgatttctgatggtagggctagactgattatataaggtgtgccacatttatttctaggattcctaaattggccactatttatcaattaggaaactcactttctatgacagaagaaaacatttctgcctatattcattctacccgtgcccttttcctgctgacatttttacacgataaaatgctatctttttaaataataaaatctgaaccagatggaaaaagtgaattgtctctagggcagatttattatagtcattgaattcagaaatgaagagaatgtaaagaagggatattaaccatatagagcttttacaacacgaatcttcattctctgaattttatatgagatggccatatctccctctctctatatataactttatttaaagagatttaaaactcctcaagaaatgatgctttatttctttcctttaatgactattataaggttgaaattgtttctgttttcttttctttaattgaatctcatcagtttccttctggagtgccaagttttgttttctcaaactctctaccatagtactacttcaaattgttgaaatcgttctgctttcatttccacatattcagaagatacgtatattgttcttgtaatcttttcccagaagttgtaaacagtgacaccagatttcagtcactggtaaaggatcatgtaaatagtagtaatccaagacatcggatacacttgaaagagaaaggaaaggagttaaaggaagttggctgtgttacattactgcctcagaaacttcacagtggaaagttaaaaaatcttcccagagagtttgcaatcaatattcattcctgcaaattcagatgccgtaagaaggcaattgaaattaattggagtgattataacaaaaatggggaaaaggaggaggggtgaagaacagcaaaaacaagatttaaaactccaatttagaagaattaaaagttataatgtgaaaggaattttttttaaagtgaaacaaaagaaatgaagaagtgatatgccatatcgaagagtctggtattgtctttaaaatatccctacaggacaaagaagaataaaaaccatagttttacaagtcattagcattctaagtcaagtctgcattttagggacatgggtagaaagccctgagcagaaactgatgttctaatagttgaggaagaataaaacaacattgataatcaatggctcaaaaagaagacagatcaatcatacgagtatctcctagggttttctacattaaagaatgtctcttttagaaaggaaaacagacatcacaattagactgtattgtttgattccctgcacagcattgtaaacaaagaaaatgatgacactgcccttgccaccaccattggctacaatttgtggtatgcttacaaggcattctgctaagtactttatatttgtgtcttcttcaaccatcacaaatatgctgagatattgtcctcactttataggatataaagtgaagcttcagagaagttatgtgttttgactaagatcaggcaggtggttaagtgacaggtctgatatttgaactcccgtccaactgactccaagacctgggtgggaagcccaggcatgccatttatagaagagcattgggatctcggatactcaagatttttctccgcatttgcctatatcaccataataagactgcggaagtacatgaagaactagattacaatatcattgttgtgactaatgttttagattgttattattctgagatcttttgtcattatttccattgctctatgctgttttgcctggctgttgctttattattgaatgaacaccctgagcaaggttcgcacacagctgttagaaatgtggaagctagacctttttcctggggaaggagatgggttgaagaatgtgaggaaacaagaccaaattaggcccatcaaaggagaacctgcttcctgttccttgtgcctcgtagcatctgtcactaccaacggaaactcagttctagtggtgaaaactatagaaggccttagccatttttttcaatagagttctatttataacatgaaaactcccttcttggactgtggggaatgagttattgaggtccttgaaagataattttggtgactggcgatgtccttttctaataatagctagaatttattgactacttagtaggaatggtccctgtgttaagtactgtacatacttgttaaatcctcataatgattatgttttattattcttattttacagaggaggaacctggggcgtaggttaaggaacatgtccaaggctacacagtgaataaatgaaagagctgggatttaaccgaggccttaacctctgtgctgcatgacctttactatttttcctctgataaaaatgaaaatatttctcttaagtacttagcttgggaatgaaagacaggtgtgtaaataaccttgactttgggtaattggcttcaggcttatccatcctactccgggccctctcccactcacatttactgtctttctgtatgtcttcctttcataatctttttcttcctccttcttgccgtggaggtttttttttttctcttctctcccttccccatagtccctgcgttgcccttgccttcttagtgcttaaatctgactctggctttgttggcattatttccctggtcttttctcaatctctctttcacgtctcctcctagtatttgaatccctgtttaccaacagcactgaaatgtgacaatgtaaagtgtaaaaaagcaacgcaggacaaccttgacaagtccagataataatattttcatcctttccaggaaaaaaacaaagaggaaagctttgtatctttctttgttccttctcatcaggaaaatcatctagctggaggtctcagaggcagcttctatctggcaaccttccctgaaacagagcaaaactgttctatgattaggagaacaaggtggagggtccggcccagagtcagggtcaaggttgacttaggcttcagttcttgaaggacaaagtgtattagatcctgccctcagagcttggcagaagttacttcattgcttgaaaggcccaccgtctgcgtaaatcttcttaccttttcattatctgcagcgaagacaagatccagttctcagagaatgtattaaaatagaaaaacattttgctgcttttgaaaaatggttccatgtcttattttctgctgatgattaagtacaaaaaattattatttcaaatagattgctggggagagaaaagaactctagatggatagtgttattctttttgtcacggtaatcctatttcttggctcagaagttacacatcatgggagaggtgacttcatacctgaaaaaatttgtattaaacatttgaccaattatagagtattttactgcctatggaatgttaatatgatttaatacgtttacctaaaatctgcattcattaaaaagtctgtgatttgcgcataatcgctgcctaaatgcttgcctcagccctctctgcattgcgtgcctgaagatcgtggggtggctagaagttctgaaccattttcttttatctctcagccaaggtgcatctgtctaatgtcttctaagcaggtgttattaggtgtgatttctggttggctgagaaatcaatgagtggccagctgcggtggctcatgcctgtaatcctagcactttgggaggccaaggcaggtggatcacctgaggtcaggagtttgaaaccagcctggccaacatggtgaaacctggtctctactaaaaagaaaaaaaaaattagccaggcatggtggcacgtgcctgtaatcccagctactcgggaggctgaggcaggagaatcgcttgaacctgggaggcgaagattgcagtgagccgagattgcgccactgcactccagcctgggcgacagctctgtctcaaaaaaaaaaaaaaaaaaaaatcaatgagtatagcagatttcatcatgctcctttcccccaactctttatattttttagtttaacagatctttaagtcctctacaagtgtttagctctttcaccgcagaacctctgcctcattgctgccccagaatcctcatcccactgactcctaaccctcaagatctcagctttcacatcatttcctcagggagatcctccctaaagccttgaccaggtcagctccctctgaagttcagtgcttccctgggaccctggacttcctgtattgtgatgctcatcgcataaattgtttttgtgactctgggaaataaagggcactcaacaaatattagtttaattggtgaatgaatttcttagaagcaaaagtcctagaagctgctttagtatgtttcaaacagtgacatctgagcatgtcttccttcccctatagacgattgcagtcggttggaaaagaatcacacactacaaagttttgtatgttgccaagaatgcctgaggtagaaaactcaattttggttgtctcctctgctatcagttttgggcccctggccttggccacctacccggcatacttgcccttaggaccgaggagttttgttctgtgagccaccaaagattactttggaaaaggaagtcacatactggcttttctccagactgaatttaggttatgtcacaattgtaatcatccagtttggcttcaggaattacttctgcctttacaagttattcaagaatcatctcttgcagttaatactacagtttgatgtctttgatttgtcctagagaggatacctcaaggtatatgtatgtgggcacatatgtgtgtgtgtgtcttgtgtgtgtgttcacagcagccatcttcttccagcaggcctgaagtcacacatgtcatagcatggcttgtattctgtgtcattcttcctgtgagaggtggcagattctttgagtcaattcctgtgagtgctgatggattttcgctgagccattttaccttttcaatcccttccttctatgacttctggcaagtagttgtaagactgttgataattatgtttctctccaggtatctcaaaatgtccttattgacattatatcatttgaaatcacaactgatcagtgtcaggtagatgaagaaggtgttattatatctcttccccagagaggggggtcagtggagttaactgacctatccaggcttccttagttccccggtgggacagccaggatgaaagatagagttttctttctccaggtctccaagcgtcctgtcttggtctgtgtacagaaccaagtggcttctgtagtctaacagacataccagacctgtaaatttgtgacttcaaaccagaatttcccttcagctgtaagattctttacatccccccactctgttctggttaatatataagttagatcttaggactggagccaggctgggtaagaccgaaaagccattggccagtaatcctgtttttcttttcatcattattttgcgatgttgctttcttttttgaaatcttaaaagtttcgcatttgtatctgcttctaaatctatcaagaacggaaagtttcttcccaggactggcacacacaaagctactgtgagccttgggcatgtgtccaggcctttccagaaagcttccctgcctggtgtgctgagaaacgctctgccgatgaggagggcagggctctgcctcgtgttctattgtgctgtttgtgtatgtctttccctttctctgtttcttcgtcctcctcccccttcattcctcttttgtgtgaaaatgcttttttctggctgattgagtatctgagtttgtggtgaactttcaaagccttcttaggctaagctacaggaaggtcactgtcacaaagagtaaaaaaatgtatagatcgccagagttcattaaaaacatcagattgaggaacacaaaatgtccacctaagggcaagtctaatgtggacgaaggctcctctttagaactctcctagttcttctgaggctgcagctctccatagaggtaagtgctgtgtgcccatcagaaatacccacacgagcatgcagagatggaggcaaggatgcacatattttgtagttgtgacaacctgaaaataacttaaatacctgccttccagtagaagaatacttaattatggtgtgtccacatcatgagaaacaataagatagatctagaggtaatgatgaagtatctgtaatatactgctcagtaaaaaagcccatgttgattttctttctatctatctatctatctatctatctatctatctatctatctatctgtctatctttttttttggagatagggtctcgctctgttacccaggctggagtgcagtggtgtgatcacagctcactgcagcctctatctcttgggtacaatcaatccacccacctcagcctcctgagcagctgggactacaggcgtgtaccaccacacctggctaattttctgtattttttgtagagatggggtttcgccacgttgccctagctggtctcgaactcctgggctcaagcaataatcctgtctcagcctcccaaagtgctgggattacaggcgtgagccaccacacctggcacatattatgtatatttaaatatgtatacatatccacagaaaagcctagaaggatatattctaacagttaacaaaaggtcctgggaatgggattaggatgaagggagagagtaggtattttgcttttttagtttatgtacatttgtaagacttacttttttgcaataaataatgagttttatcataataattaaggatcacaggcatttaagaagtgaataatatattagcatcactgactcttacctgtaattttgtgtttccgtctgggtgttcttttcagtgaaacactgtcttgttgttaggctgctactgtttttgacttgagtatatgatatgaattatcacctctccatatctgtttttccatcagtgtcatcataagagtatcttttcactgaaatattaagaaacattaagcaagtatagtggtgttaattagattaattcatccctctttttaaaggtgcaaaactctttttctgtaaaagtcaagctgatgtaaatgcaaatatcaggttttcaattaatttctggctttctggaagaaagtgaaattattgtttatcatttcatttaatctggactaaatatttggagtattgaattatttctatgactttcatttgatggtttcatgtatctactttagatgcagataattgaatattatagttccaaatgctttaacgttccacattagtgaaacaatgatctacaccataatgaaaacagtaacacatttattttctttctgtttgtacttcaattccaaaagttaagcattaaattggctttagtcatacttatgctttgatgatagtccagcttcttggtgtgaaatcaagatgtgaagaaagttagacacacctgtgaaagcccagccttcactttcacatatgtgggtaataacttagtccagttatagtttgttaactaaaaaaacaatttctttgaagtataattaggtgataatgataattttaaaatgtgctaaaaaattctttttggctgaaaaattttggtaaagtgtttagttaagatgaggtgttgtgtctctgtcaataaaagatgcatggattaatgtatagtccctgtcatcttctccagccttcagcagtgactattcctggaccgtatggggtaactggttgctaggcaggcagagtgttctgttctgttctccttgtctgtggcatgtgattgagtcaggagtgttggtaaagtcttctttgaagatgaagcatagaataatagcatgcaaaacattttatcctttttatccttcagctatttgtctctagccttcagtgagtgggtgccccaacctaaagacaacatgctgtgttattactaacatactggagggagctgtgcacatacaaatgaccctgtctctttttgtgccctggaaccttgtcttcccctaggtggactctgtgacccacagagccatcagaagaaatcacctttgcttatcaagtttttgttctttatcttttaaagacataacttctctacctactgtttctgctacttgaaacatattcctctcattgtaatttgagaaacaaaaggataattttatgaggacattttcagtgttcatgctgaagccctggtgatccttgtcaacttgaatttatgcatttatctttccacactcaggcacttcctttcatcagatggatttctggcctaccggcagtcagttatttcctaacatattaggtggcagattttgtgggatttaatttgagcataatcttattgtgtacagattgctttgaagtttcttcaggactcactaaaccttctacacatcaatttttctgccctgtatgggtttttccaaagtttagcctccttaaaacaaacaaacaacaaaaaaaaaccttatcagtttcactgcagcactccacttaaaacaataaagtttagtttgttttcaagtgctttaaatccattgatgtttctaggaacttttggatgaatgatctgttgaccacccacccaagtttccaggggtgcccctggggtccaccctggtgtccagggattgctttgcctccccacagccagttgggtgcagtgactctccatttgtctttctcagtgcaatcgcttccatactaagggcctggcttgaccagtgtgcagaagacttccgagagccccctcacttcccttgcttacagaaactgctggattatctcacacggatgatgccgggctctgacccagaaagaagagcacaaaatcttcttgagcagtttcagaagcaagaagtggaaactgacagtgagtacttgtttgttcccagggaaaaggctagattctgattctccagcctccacgctggagaaaggttctccctgtgctggctaataggaaaccttggtaccctcaaaacaacatgctgctggaggattggcttgagtataaaattctcaagattactgaagtactaattagagagcctagaattttagacagagaagggtattttcaagactacctaatctggctccctcattttatggatgaggaaactgtggaaactccagctcagaaaaattaagtaatttcctggggtttcttctgttaccaagaagagggtctccttgatgaactttaatcttcccttatcaacatgtaccatgctgaacctgaatttgcattttattacctgtttaatggctccttctagccttccatcacaaccactcccgtctagcagtcaaggaatgaagtctagttctgatcctgccctcccaaaagcttggaaaaggtgtttgtccttcagtatggaaaagcatcactgtaacgggtcccctgccagtgcagattgtcatcatttagcatctataagggcctcatcaaaggaagtttctgcagctgtttttccctatttgaagattaacttcctatttgcaaggacaaaggaaaggccaccactgcaggttatgaggtgcttggaactattaggctttgaagaaagtcagaaagaggctgggacaggcttccagtgtgatgttgtatcctctcactggggtgctgggtgacagtttccatggtggctgacccacttggagcttctgacaggcattaccctgaagggatgcctgacttcatcagtaagggaaaggaaatgttcctcagcaccaataaggaaagctgcatcagctccaaagaaaatagacctaaattccaaacaatacctgctgaatttcttatggatgggggtcccagagagagggaaatgcaattgcatcattggaagctgactgccaaatactctatatctcagatgacttcatctgccaggaatgtttgaataccaggggcactcctccagctgcggacctcagctcccttcagggcctccatgcctggctttgtgctggagtgggaaacgctgtgttggagcccagctctccccactggggctgcccctggctctgagcctaattggggaaccggtgggaccagtcattcattgtttccaacacagggactgcaaggcagagctcatttggcaggctgaggcaggggagagggagattgcctcagttcccatgtgcttgttttacccaattttactcctgcggaagaagcaagctctcctatatgtttttaaaaagtaaaatcgtgcttcatgttgttacttatctctggaggagaatcaaaagcagaaaacagtgaaggcatggactatgccccagagagaaaggatcatgtaatcttcatgcacagcaacattatagacacacattgggctgctgtgtttgctgaatgaatgaatggaaagatcaagccttagcacataccctgctccttgactgaagtgggttaggctctgcattgcagggcaaatgggatatatgtatgtatttgttgacaagacgagggagaggccctttctgaacctttatttgggatcccaagtttctaattacacctctaaattaaacagtgccagagttgtatggaggaagaatgatgaaattagattgcttaacatcctccatgtcatggggttttagcttcctttagcttgtacctgtttgtgtcgcagactccggggataggcagtgatccccttctacgtttttcagtcataacccaaccccattggcatctggaacttcaagtccagggtaaaggggcaatcctcaaatcacatacctgccaccagtataggcagataaccacatgctgccctaaaggggaagtggtgtagggtccactctcggaagctccttttccctggaaaatgaaggaaagccactgtgacttaatccaagatgcccaatagtctttaattctacaaagaaagaaagaaaaggctcaaaatataagcattctgggggagtagtaacatgctgatttacatttctgctaagatataactgaatgtaactagagttttctttccttgagaacaggtttgacaggaaggagtgtgaggggtgtgaaggggctgaggttgggaaacaacccgagcactggggaaaggttccaggaaaggaaggctggggatttaagtcagaaaaccttcatcaaattccagtctttcaaaatggagactggaggtcctattccaggtgtgggctcttctgctttttattcggaatcctgggtactgattttctcttcttcatgctgtgccctatgtaatttgctaattgatgatcttggctgtgataggttcaggtgaatttagttgaagactgttctgcttcatgcattcttagctttgggtggaagttgaaagtgactctgaacattttgagaattttgagggcttcgtcagcatttctaacaccaaaatggctcattttattgcccaaagtcatacctgccttcatggcgagtccttccaggcttctggttataagtcgcccagcaaccaaaaattgcatggttggggtttaggagttagttggattagtcctggagctgatctgatcaaaaagtttgaaagagccctagacaaagggctctctctagactttgcctatcctggctctgtccttggcctaggagccagtgatttgtcagagtgagagcatgagggctctgatcttaatagagaatctaagaacaagcagagatgggaagatctccattgttctcagatgcattgtgcttgtggttgtctccctgtggctgttctggaggattggccctcttcttcctaaacaaggagtaaagtctgatgactctataagcaagattatatacactggcgccaaattactaatcttttccatatgtgaacagatgggcttcccaacacgatctccttcagcctggaagaggaagaggaactggagggtggagagtcagcagaattcacgtgcttctcagaagatctcgtggcagagcagctgacctacatggatgcagtatgtcttctctttgtgatcagatgtactttcacttaaaacataggggagtgatggcactggtgccccggtgacagcagtgggataatgtgattttaagtcttcttgaatccttgagacaggctgcgcctgcagatacagagttaagatgtgtcttgaatcaatcatctgaataattcaggcctgagctcttcttgcaactctaggagaaggtgcttttggagctcaagacacagagggaaataagaattcgaatccctgtgaaacaaaatctgccttgttctgtgggtatttttctccctttacactcataaatatttcaagatctgaactgtttatttggaggattgtaaagggatcaaagtataagttagaataaaataaattcacagaatccacatgtgattgtatctggcccctcatttccacgtgtgctttctgtacttttgaagtttgaatatttttgtgagctggacatatttgagtatgtcagtcagatttcataggtcggtgttagatggtaaatacaagaggactgtgaggagttatcgtggtggctttagctcttctgctttatcacttttgacaaggcagtgtggaacagggtggagattttccttctagtgaacattatcgatgagtatattaattatttacttttgtctgttgaaatggacaccatgagacaaatcaagtagaaaaggattatctggccattcacaaaaataccaatttacaaatgacccagatgacatgctttgccatatgaaatgtctgtgttgtccttaaagtcagttcctcttttgttccagcaactcttcaagaaagtagtgcctcaccactgcctgggctgcatttggtctcgaagggataagaaggaaaacaaacatttggctcctacgatccgtgccaccatctctcagtttaataccctcaccaaatgtgttgtcagcaccatcctggggggcaaagaactcaaaactcagcagagagccaaaatcattgagaagtggatcaacatcgctcatgtaattgtcttttataaaatattctttgtgtttggtagatgcaagagactgctccatcacttcgtttaaatggtttagctgtttggttgaaaaggcagtcaaaagaccatatatgagagcccactgggtttttgttgttcttccagagtaagaaaaaagttgcctttctaaacttggcagcttatttattttcctcttttttaaaaaattggacccctgctcacttcttcccagttatgggctctcacactgctacctctctagagtgagacattctgtctgctttcccctttgtattcacgacaagactgagtgttggtttcagcaccatgttcagtaaatataaatgtatggtctgcatgtcaaaacagactgcccttcaacccagagtgattacctatgccccctcccagtacctggaggcattacatcttctgcagttttgaagagctggtacttcttcagagtcctgaatctcttttctaaaggactgagacacttacagagatctcatattaatctgaggtcatgtctcatattaatctgaagttggaggggaggagtctgttcctaggcctgactcacattcttctgagtgttggagtctagtctcttggatgaactgcttacataccataggacctccccttctcagcatcttatctcatgactgagaaaatggcaacagtgtgcagtcagtgggccaccaaatattttgtgaacttctaatgtgtgtaaaccacaatattctgtacttaggggacatactaggatagagcataattatttgtttgcaggaacccgtacacaaacaaggaagctaagatatactggaattatctcagcctgagacagtagaggagtagggccatgggagataagcactgtaaaagtgggggagagagaaatcatttctgatgggatgatcaaggaaggtttcatggatgaattgacatttgaaattaactttgagtaacagataggatttttggtatttgaagattagagaggtttttttttttctaggcaaaagaaattacatcagcaaaataatgattttgaaaaattattaatatgaaaatatcatattaatttgtgttctgggctctatgggtaaactctcaaccaaaacacattttgctttatgtccccttaaatatatttttccttgagcccctattgatagggcataatgttacattctcttttgctgtctttgattaaagagcagagacacaattgtgccagataatttgccttgagtcttcaggtggtctgttattacagacttcttagtgtattatgaaagtcagcaagaaacaaagagtgtaagttgcataaacaacttctatttctcctattctaaatcgagcttattgctcagcaagtaagagatacaaaagaagttgtgagtgagatatagtgtagaagttctctgtttttttagaatgataaggaattatttttttttttgccataagtgtcacagcatgtctcaaaagcagactgtctacccctaattcattcaactactttggctatagtgacaatatagcatctgtgtatgtgacatagtggggctcaagcgatgacttttggtccaaattgaatgtaaattgtgcatttatgtagtaataagaaatgcaagttgaatcatttgaagtatatttcaaatcccatatcatgtgctaataaagccaagggctcttactttttttttggtgatatcacttcctaatactgagtatgttgtatcttttacaattgtgtagggaaatgtaataaaataatgaggcttaccagtggtttgctaccaagatttattttacctttcctgcattcatcgtagtcaatttctattgaaaggatatttgaaaaagaaaatttttctgacctaatatgactatattttcttggactgcccttaatggtatgtttttacttttgcatcacatctcctggaagatgcctctttttctagaaatgggaccagatgccttttgtactcctttaaacccttagtttaaacctctttttgaataatgtgttccatgtgtttatttcaatttgcatgatgtatctgttcctgagttcctttttttattgcaagtttcctgatttttagaatataacttttgtgaacctttgttgaaccatgctcccataggcttagtttccagattgcaattcagaacatttctcttgttctctctctcttttaaaaagggtggacatgacttttattaagtactttggcatttactctaaagaaaatgtttgagggtttgtttggcatagttttcagtgtccagattttggcatgctaaattagagtgctgtttttccttcgtattcaggattaacatttctttgtgaaatgattctcgaagtgatttacatttatgcccaatcactctgggacttcttacctgagatactctacacaaaaccaaatacgtgctcacatggtgtactcacttgtaaacactgggcctagtacgctgtcatgtgcctgtatatgaagcatctcctttgacataaggcctggtccagtctcctcacgttgctaccttccccatgccagccaagaatgggactttctccctgtctgttttgctgtccctgctattcagtcacaggactttgactccaaggtcactaactgctgatgctacaggctccttatggtagcttaagtttaaatagggagcctctctccttacccagaaaatggcatccagaatgtttcctgttctctttctattttgttttaaaacattgccaaaatgaattttattttaaaaggccgagttattttggaagcattgaagtaccaaggtgtttttgaatgtttatggttgcaggacaagccaatttgaaaccaaatgaatgtgtataaaaatatccccccttggctaagagcataaaagccaaagttcaacttgtggtgaatttttattgccaaattatatacacctctgtggacaagggttggtgatgagatgttcaataccatctgacctcaaagtggctgctgcccagctcattttgggatctaaagaagatctaaagtgcatatttttaggacatctgtgtgctttcagcagaagaaagttgctctttctagcatagctctgtagacttacctccattagtgtttttactaggaaagctggaaactataaaactgtaacaacaacacaaaaaaatatattgacgagagaaaaacaagcatactgtgccaaaatctataaagtgtttcgatgactggggtgggaggaaggagccactttttgatgttcactatttatacagctgcctattttgtggtaagaattcatagcagctgtgatacctctaaaacaggaaaccaccaagtcattgtaatattgatagttaaatgccttttatgttttaatcactccccatgcaggaatgtagactcctgaagaatttttcctccttgagggccatcgtttcggcactgcagtctaattccatctatcggttaaaaaagacttgggctgccgtcccaaggtaagttcccaagtgtttgctctgcttttctttggccgggataattagtggttgtgatgagtcctcaccttcaaagcttgtatcgcataactagagaaacatatttgaaatcctctgtgtgtttcaggcagggtgcatcttacacataatcattaatgacttttgaggcagggctcctgcagaaatcaaactcattctaagtataccaaagccaagattattggctttggggatgatttgaaggatgtgcttattatctggattttgagggataaggttgtggagtgatgaagttacagcaatttgccattacttctggttatttttcagcctcactacaaagccctaagctattttaggactcaaggggtaatgtgtgcagataggacattagttcttgatgttcagtaggaaactatttagttgtccttttagtttcagcattttaaaaactatcttattggcattaaaaacctttaaatgttctttcctaagtacctgaaattattaactggccacatcctatgctgtttttcttcatatttcttggtgcaaccgttggaataattaacaacttggtttcctgatttttgcactactgccatcacttccatttccggaacttcactgtagatcaaagaactttgtgcaaaggaaggaaaggtgagggagggggcagttctgattctctgtcactacagatttagaggctggggattgtgtcatgagtacaactaggccagctacattcaacaagtttgcccaggtttgaactagtcaggaagttaggctatatcagggaagaatgtataaattctgtatggtctataccacatgtggtatagtcagtttcagttaggaggagagggatgccagctggcttcccagccaggctgccttagtggggcagaatggaaggtctgggtcctcagtttcataagtttactcagagttgatcaagccctaagagactggcattgtttgaatttgcaagagccccaagctggtaaaccagagtttcataaatttatgctgaaaaatgagtgccagaatcctcaagcttgctgataagctcatattctcgttcaggggatagtctacttggtgtaagccaaattatttattaggtgattctttgatgggtaaaaagaaaaaaataaagtggatgtttataatgcctcatgttacagagctgtagaagccacagctacttgcactccaaagctcgtgctttgtttatgacatcaatatttatcagtagaagaactagcaggcttttcaaagaccaatgcaattttcttgattattattctttttttaggttctttcttctctattttgaataatcaaggtgattgtgtgtattaaagagagattagttggttgattttcctctgcacatttctccttaagaacgatggggtcatataaaatcattacttgataggccctggtgaaatgcgatgggaaaatcagaagcatgcagtgtccccacccttcacacctccacttcacctcttctttcccttaccaccactctccactcaactgtagtatagtatcaaaaacaaagggacagtcaagtgttaaaatgtagccttactcaattgattgcaaccttgtctgattgccacgaaaggtaatcctttctttgatggttgaaaaaagaacactaaggaaagtcacgtaaccagcctaagatttcttccacagcaagtttgagactaaaacatgagcaaaaaaaattaatggacttgtatcttagtctccttggctgccatatgaaaagatttattctagctggcttttaaaactattttctaaagacaaaggaaaaaccctctaagctgcattctgtgtaacatatgtttctggtttgtttcttagttggtttgtatgtgttttagcaaggacactacagaagtgtcacagttccttagagaacacacttctatatcagctttacatgttctccattgctaaattcaaggaacaggattaagataacttatttggacatggtacatctatacagtggaatattttgcaggcataaaaggagtgtagtactgatacatggtgtaacatgaaggaaccttgaaaacatgctaaatttaaaaagccagccacaacagctacgtatcatatacttggacttgtatatgaaatgtccagaatcagcaaatctatggacacggaatgtagatcagtggttacctagggctgggactgggaggacggtagggtcccagggtgatagctaaagggtagagggctgctttttggggtgataaaatattctaaagttgattatggggatgactgcacaactctgtgaatatactaaaaagcattggactgtatacttcaatgatatgtggattatatctcaataaagctgttattgtaagaaaaaagatatcttatttggttatcactttccctataatccttgacatttgtcgctttaagtagacaaagggaatacctatttatttctcttcatttagggccacatataattaattttgaaattattttctccaaatatgaatagcttaatggttttctttattatttagagtaatattacactcactataaaacaggctcttaataatggtttttttcataataatgaaaatgttgcatatatagtgatattgcccctattaattctttgtcttcagaatcatgcactcattaaccctggagggtgtgtagagaaaaccatgaggctcacagagatgtagtgtcctggaaagggagaggggcagagcagatgctttgcatatgtggtttcactcactgtcccagcagtcccataaaagcactgtcatatttcccttgtagaggtgagaacattgaagctcaggaaagttaagcagcttgtccaggatcattcagaaagtgagtggagagatgcaattggaactcaccacccctggttgcagagcccatccggttccaccattctctgactctgggagtagaaatagtggcctgtgagccagaaaatttggcttccatacctacaaccctcagcagttattcgtggaaatttgggaaaatccctggttctggcatcgtcatctctaaacttaggggcctggccaagatgacctctcagatctgtgggctctgtgtgtgtaacagtttttttttttttttttttttttttttgtttaactcactgagaagaacatgtcctaattgaacaacttgatgccccaattgaataatccttttttatgattataatatgcatggctagggaaatatacctctctccacaggggtggccaagtccaccttaaaagaaataaaaagccatcccgcataaaaaaaaatcatgggccttatctgtgcttacagtacccaccaaccctgagatcagcacagtccctccttagacatgagtcctgaggacagctgggccaaaagtgtcgggttattcctaactcttcattgttaatattttcttaatcccttttcatagggaccgaatgctgatgtttgaagaactttcagatatcttctcagaccataataaccatttgaccagccgagaactactgatgaaggtgaggctcttagtgaggctgctgtgtagtgctgttaatagctctggaatccattcaaggaagagtagtgtgagggctccttaagttccttcaactccaaagaaagcctaaagtaactagaaggcaaaaaatttttttaaatgcagaatctaagaaacttggggctgagaaaattctaagtccagttgagctctctctttctacctcccttagcttgcctgttatgcaagcagattgtgaaacttgagttcatatgtgtatgtacctccttaacaagctactctgcaaataccaagtgctggcagttaggtgggtgagaggccctggaatattccttctcagcaaaacatctagaatgacagaggccaagcctgcctgcaattccacatcctttatttggactaaattgcacaatctgtcagtcagcagtatttattgaacaccaagtaagtgctgacttctgaatgacacactaggtaaagatatagcttagttcattttatgtctccagacatttgttgaatgcctaatatttgtaaagctttgaacctgcttctagaaatatgaaggtgactaacacaaacactgtttcctggagtttaccatctaattggggtatatagacactaaacaacaagaataaatagtcaaataaagacaactaacaggttgtgaacaaccatcagaggggaactagcatagaccaaatattatcctcatagtctttctataaagtagattttatcatcatcattttgtagatagccaagactcagagagggtaataacctgccctaaggcatacaaccaataggtggtagagctaaaatatgaatgtaatgtggtgagactctaaaacctgtgcttttatcaccaagacataaagctatttcttctgacctttttggagtaaggtgcaggatggatcagatccagcttcatagagaaggtaaattagtagttcagtaaatattggttgagcacccactaggtattggggataaaaccatattaaaggcagtgtttgatcttaaggggattacagtctcatgtgggaggtaaaacatttataaaatagtgtgataggtcctaccataggggaaagtcctgaactgggcaatcaaaagttgtgattcttatccttaatctccttttctataaatgggagccaatcaaagtatttggtctgttgacttcatagaattgttttgaagattcactatggtaaaatacttgaaagtgctatgcaaatgtaagttattttttgtatttggtgagctatattcatgtaaaaccaaagtatgcataacaaatgaaaataaatagagaataagctgcatatttgagcttagggaagatacttggagtaggagtgaaaatcaggtagaggtggggttagtaagaaaaggcatccaggtgctaacccttaggttagtcgatcctataagggcatttgttaaggtcttcatgactgttcctgtcctatgtcctacttatccttcatgtctcagtgtagactcctccttttctggaagccttccttcattctcaggtctgtgctccaggagaagctgtcatttctctgtcctggcacttatcacttgctctgttgcaactgcctgtctctctactggtctgtaggcctcttgcaggcaggggctgtatgtatcttttcactttgtatccctaatgcccaaccagtgcctggcatgcagtaagtgttcagaagctattgtttggctgcatgaattgatgggtcttatcattcacatgactttttaacaatatgcccactattagcccttcttggagtaggtgatatgagaagggcagtatgtgctgatgtctgactttggatttggactacctgattaactgcacactaaacaatcattactgagatcgtgttactccctgcttcacatgcccctggctttgcatactttaaatggaaacccatctggctggaaggagatggcttagtggtctccctgtcagcagtacgaagctagactaactggagccacacattcaaatccaaacagtcctgagtcttccttccaaagtagataaattgaatactgtgcagctcattgcctggtagcagccttctggctgaaggcttagaagtgaagctgtatctagacattaaagatcccataaacctttcttaaatgcagaagttaccccccgtactctaaattaaatttcttatagatatgactcaaattccaaagaaatggaaaacttggctgtgaattcatgtggtctgtgcattatcattaatgatagtgaaatgctttgggcagtccatgtatatctgtaggtccttttccagtcatttttgttaatcattcttcatatgaagtgtctaattctgagtgtaaattgtcagcacattttttttttaaatggaatcacaaggtacttagtttctcaaaagagtcactaggaaaaactaccggcctctgtttctagtgttactcctggttttatacggatttatggttgggtaacaatataatagtttcattttattttattttttgtagatatgtagtctcattatttttctcaggctggtctcaaattcttggactcttagttttaaatgacctaacttctcttcttctgggaagatgtaacgtgccacttatataatatggcccaggcaacatgattattagcaaaaatctgtggttttccttttaattgtttttaaaaatgtttcatttcctctcaaagactatcttaaacctgctatgtccttgtgatttctgaaacctgggtaattctaagcaggtgaattatagtctggaaatttcaagacatcagggaagaaagcagaatgccagcaaatcttggttctcatgattcttggtaagaattttttcggttgactttatataaaggactgctagaaagccccagaaattcaaccctgatggagacgtatgttcagtgacactccaaaacatgctaaactcaaagttagagcaagagtctgttacaactgtgacagttctgagctataattgctggtagctactgagcttaagttaaccaacatttatggagatggatccagagtccagtagacaagttccatctagacctagtagaagagggccctctgaagcccaagaacagcatggatgagggtagctgaactctgctaaagatggttataaagaaaaggtgagacttaagcaagccatttgcactaagagacggagagggaagagaagggcagagggggagataaaaggagagagagagggagaaggagattgatggaggaagagggagatttggcatttatccaaacataggtgatgattaaaatcatgagattggatagtatttccaaagacatgagtacagcagaaaacaagaggataactttgacaaaaagaagaatcactaagagaatatgagaacagcagaggaggcagggggagagaatgagtgatacagtcacaaaaacctatgaaaactttcaagaaggttcaagggattggtgttgtgcgacattgcagagtaggagatttggggctgaggaaggaaaaactgaaactgctggatgtggcaggtaagtggattttcagttgacacctcatttggaataatagggactcgtcggtctttttagatctctagcagggatggaatctcattctcatgaaatcataaagtcatggaatcaacaagtcttgtagctccccatctcaggcgtttctctctcctatctaatgaggaggttgtcttaagtgctcttttgagatccctttcacctctgttattctgtgattcttaggagcctttgaacttttcagaaattctctttaggaattttagccatgtctacaataacttatgatacattattcctctgcccataactgacatactggagggagaccagaaggacctacacaccggaaagaggtgggcactcttattcaagtcagacataattgatttctcactctaagcaaattctcaagaatttcggaggactcacaactatctagcacaggaaaggcgcatattaggctgctttcttttttttagaggtggggtctcactatgttgctcaagttggacttgaactcctgggctcaagcgaccctcctgcctcagccttctgagtagctaggattacaggcgcatgccgccatgtccagtataggctattttcattcatccctgtgaaaaactatgaatgggagatcattaaatagtggctctctttattatcatttgtgatgggaagaacttaaataggtaatgagtcactgtgggttctgtcccagtagtgtacctgggacctgagttaaggctgagagatggaacatgttgatgctctatcactatcagcaaggccaagccactgaaaaaaacccttttgtggttgtacagtagtggaaggtcacgtgctatggtaatacataaatctcaggaaaagtgactaaggaaaaactagtgtagaagttatatactactgaattgtgcaatttacccccccattcatgcagttcctggaaaatgagaacttaacaagaccccaaaaccgcaaaagcacttaatgttcagtcagcaaactcatgattactcattatatagaagagtttgttgttacaatagacaggaggagagaaagggtagccatgtgtcctcaggcaccaggaggaaggattgatttgtaagagttccaaacctgagaggcaatttagaagaactgactgggggctggggatgtgtgaaagttcgacttttatggattggtcatgtagtacaatattggacttcctcagaaaacttccggtgcaaaagtttcatttagctaagaaatgctacagaagtagtccctttctttcacagaatgctggcacatccatttcaggccaagatcgagaaatcacaaaatgtactgaggaagtcgatctttgttttcaggatatctgattactttgagtttaatttgggatctgtaaaaatgtcttcatttatgagaattgcctggcttgtattgatgattgctttcataaccaaatcaggtgatcttcttacaaagtaaggggaaggccaggtgtggtggctggctcatgcctgtaatcccagcacttggggaagctgaggcaggtggatgatctgcgatcaggagttcaagaccagcctggccaacatggcgaaaccccatctctactaaaaacaaaaaataaaataaaatataaaaattagccaggtggtggcgcattcctctaatcccagctactcgggaggctgaggcaggagaatcacttgaacctgggaggcagaggttgcagtgagctgagattgcgccactgcactccagccttcccagcagagtgagacttcgtctcaaaaaaaaaaaaaacaaagttgggggaagaacaagaaaatccaagtccaccagcctcgttataaataggcaacttgcaacaagccagccaagtatttgcataatatacatcgtgagagcctgctggaggcctcttcattttgcatggtgttccgagcgagagttatgcagggttgtgtgcgagaaactagatgcctctttacttcttaccattgtggcatcctgtatcaattccctctgtgtgcatttctgtttctcaggaaggaacctcaaaatttgcaaacctggacagcagtgtgaaagaaaaccagaagcgtacccagaggcggctgcagctccagaaggacatggtatgtctggccctcgtcttccctgacagctcacagaggagaagggccgtgtgcgtctgggctcccacatggcactggcaccttcagtcaacagggcacccaggctttcagaaagggtctcccattctctaccccatttgttctcagcagccctgggaggtctataggagagagatgattaccctcattcaactagtaggaagtaagcactgggtggcaaatcctgttttctggcaaagttgttttctgaaggtgagggggagtctacagcaggtcgacttcctccctcttgcagtctcttccgccccctcctgcacttagaagctgctccaccttggcctgagggcctcctgagcttcctactgtagtcagcttctgatacatggtgaccaaggagaaagagtgtcttctccacagggccctggtccttgtactcagagatcttttcatttgttctaatctagccattgcccagctctccttactaatcccaaggctaaccaaatctttatagtttttcaatatttaaaggagcatcatgcctccctcctgaagactgaaagataggtattatcaactttagcttcattttaaacttctgactgttagcataaagtgtggaagaccagagggaggagattagagactgacaaactctaaatattctgctttaagagggttttctctttctttggaaagctcaacgtaagtaagaaatgtttttgaatgataggactcttccgcaacatgaagcctataaaacattcacagtgttacaaacttttttggttgttcaaagacaagctaaaaatagctgttaccaaaaaaatagattattttagtacaggatgagaccttgtacacagaatgggaaggacacactgcagctgacagtgagttcctgaaggacaaaaccctccttggtatgaacctcacaaagcagttctggctgaggaagcagccagcctcatgtcaagcagcctggctttaccctgtttgaggctttgtgttctgccaaaatttccagaattggcttgatgagatttaggataagggatccatggggaccgctttttacttttcctttaggatgtttagtgccttggtggcttactgaagaagagagatgattttaaaggagatttagtgaaatgaatatagtgtatccctgcagttgtaggtagaagtgcctccaccttcatttccaactttttattctggaataagtttagatttacagaaaagctgcaaagctagaagtgcagtttccctcattgttaacatcttctaaaaccatagcacatttgtcaatactaagaaactgacactggcataatactattaactaaaatctagactttgtttggatttcaccagttttccactagtatcttcttatctgttccaggacccaatccggcataccaactgcattttgttgtctgtcacccctgtctcttcaggtctacgacagtgttttcttgactgttttttatgaccttggttgtcttaaggggtctatccaggtattctgtagaatgttccacagtttgaggttgtctgctgttttctagtgattagactgagcttctggatttttagaaagaatatcacagagtaaagtgcccttctcatcacatcacatcaaggagtgaatgaatggtttcagcgtgacatctggtgtcatgttgatggtgacacgaatgatgttgatctttattacttggttaaggaagagtttgccaggttcttcctcagaagttactgtttttctctttccctcctctattatttgagagttagtcaccaagtctagcccaaggggttatattaatagtgatgccccatgcttttgtggtacatacttctctgtgtacaacagccaatggtgaggcaatgactatccagtgccatccccaactaccaggaatgtccccatgctctgaaagagaacagacatccttctcacttgagccaaagcaaaacataaaccccacagtcaacacttttgaacagatgtgtatgatctcctggctttgaggcttggttttcatgatttcacaagttagatattagatcatggagtttctatcctatttgtgtagaaatttaaaaaatgttattcatggaggttagcaccactggcccgcagttaggccttgaatacatccatttgctccagcttgaagattcctaaaacccctcaacttttcaatgacaataaagacagttttgctttggatgctcttcagggtgtgatgcagggaactgtgccctacctgggcaccttcctgactgacctgaccatgcttgacactgcccttcaggactacatcgaggtgagttccatgtgggtggtgtgatcgggcctgcagccttcccactggataccctaaagagtagttaacttctcttagtatcttttgaaggtccaaaagtacatggcattgtgctagctgttaggaggaatacaaagaataacaccaaagactaacaccagaagtggctcaaaatccagtggaagtaattaatatatcaaaataagcagtgaacgatagtaataatcgaaattcaaacaaatgcattgagagaacatgggagatgacaattattattatttttttgagatggagttttgctcttgttgtccaagctggagtgcaatggcacgatcttggctcactgcaatctctgcctctcgggttcaagcaattctcctgcctcagcctcccaagtagctgggattacaggcgtgcaccaccacgcccagctaattttttgtatttttagtagaaacagggtttcaccatattagccaggctagccttgaactcctgaccacaggtgatccgcccaccttggccttccaaagtgctgggattacaggcgttgagccactgcacccggcccacaatgaactcttatgaggggttgtgatgaacagggctcatgaaggagtgggtttgggtttgaacaagactttaaggccgggcgcgatgtctcatgcctgtaatcccagcactttaagaggtcaaggcaggtgaatcacctgaggtcaggagttcaagaccagcctggccaacatggtgaaaccccgtctctactaaaaatacaaaaattaggctgggtgtggtggctcacgcctgtaatcccagcactttgggaggctgagacaggcagatcatgaggtcaggagttcgagaccaccctggccaacatggtgaaaccccatctctactaaaaacacaaaaatcagccgggcatggtgacacatgcctgtagtcccagctactcaggaggttgaggcagaagaattgcttgaacccgagaggcggaggttgcagtgagccgagattgtgccactgcacttcagcctgggtgacagagcaagaccccatctcaaaaaaaagaaaaagaataaataaataaaaatacaaaaattagccggtcatggtggcaggtgcctataatcccaactactctggaggctgaggcaggagaatcacttgagctcgggaggcagaggttgcagtgagccgagatcgtgtcattgcacgatctaggtgcccagcctaggtgccagagtgagactcggtctcaaacaaaaacaaacaaacaaacaaacaaaaaaccccacaagactttaatgttgagtaggactacttggtggggtagagagtcagtcaaatttgtgatttttcaaatatgcttttctttttgtattgctgcctgctgtggggtatttttctctctctctgtctctctctctctctgtccccttgtccctctttctctctgttccccctctctctacccctactcccttcatcccccatcttctctgaaagggaaaatacatgaaaactcagataaacaacttgttagtagcagcaataaaatattaagtgaagaagaaatttcaaatttgaaatgaaattgaaagattgcttgcatatttcagtatatactacccccttgttatcatatgcaaccagcctgcttttattgtatcttaattagaagaagtagaagttactttgcatagatctacctacctttggatttgccacagtgttgtggacacatttattcattttgcatctcctgacttctatgtctcttcacatcctctttctcagcttatctcaggaaacacccatcagtgttggggaattctggggagtaaccaaagatttagaagttaaattcagcctactgagaataggagctgaggggatgaagaattgaaacttaacttttcatgatgctatggagaaatgacttcccttttgataaaccgtatgagtcaatgaccatctgttttagttgcttttggtaagggaaaaaagtgtaatggaatatttactcaagcttttatctttactggttctgcaagtgtctttggatcctgatttgtaattatttatcattactattttagttggtttcagacatttcaagagaaggctttctgcttatcctgccttataataatactttttttaaaagcaaaacaggactctcttcttccacagtagtcgtaattataggatcattgataattgtgactttatcacccctttgatctattttaatgtgacctacaacaacatatggctgtgttttaaagtagcttggttgctcactctttttattaaaatttcttttagggtggactgataaactttgagaaaaggagaagggtaagtagagttgttggctgtgtttcctttgtctgagcatgaaaaaaatgaaagaaatggggacttaagtttttttgtagaggcagaaaaaaatgagttagcacctactgaacgtttatcatataccattttgcttggcattctcctatacattatcccccactagccttatgaggtaggttttatcatcctcaattcaaaggtgaggaagctaggactcaagagattaaattactggacgagaatctcttggtggcaaagccagggttctcatcctgtcctgatgccccaaagcccacatttcttccctgcccactccttatctcctttacaattagcttcagcaatagcaggcttgccacttaattaataacaatgtattttatacttgaagattactaagagtagactttaagtattctcatcacaaataaatatgtgaagtaatgcatatgttagttagcctgatttagccattccacggtatatacatgtttcagaacatcatgttgcacaccataaatacaaacaattttttaatttgccaattaaaataaaaaccaggtttaccctattaaggataaggggtttctgatgagtaaatgacatagaagagttaataaagatggtaaactctcgtgggtatactcgagagaggaaaggaaatggccttcgtcttcggtgtaggtagttattctttccctttcgtgtcagcataggaaggtgtgctcaacatcaatttcactcttcctgtggatagcacagttctgaactgtgctattcaagataaaacagtcttgaaatttttctgtgattttcatattcaaatggcatatttaaatagatatttaaaagactcaaaggaaaatgagtgagcaaaataataacttcaccctgtagtactctcgttatttttcagtactttcacattccacaaatattgactgtctacctaacatggggggggtttgggaattacagcagagaaagaacagagctgcctgccctcgtaaagttcacaatccaggagagaggtagacaaataaataggcagttataatacaacctgaaaagggtttgtgagcagaagtagtgggtgttagagaagtatataggtggggtatctatctccaacttgtagggccagagaaacttccaggagaaaatgacgttgaagttaaaaccaaaaaggcatagaggagctaaacaaagctgggcttatcagaacaagatactaacctggacaaatgtaaattttttgtcccatatagacgatacttttttctttagcatgatggtaaatattccttgaggatactgagaccaagggccgaggtcactggatggcaagttgagacttggagaatctaccagttcttgagttacttctgtcatgtcctgtaatgataataaattcagttattgccccctcagttcccctctctgtcatttaacttcagaataactgtggttggtaatctctttcctttttagactaggatattaaacttctggaaagtttgactgtaaaacctaaacctaaagcttatacccattgctgacttaaattttttttattgaaacatccaaataagtataaataattttcaacataattatgtacttgcctctctgtgagttttaaaagacttagttaaatgatttagtggcgtagtaaaaacccaaggattcaggaaatctaaacattcaattttatgagacctaggactgtttagatactcagccctaccaaaacttatttattgaggggtaaaggttgaggaagatggggatggggatcttgggagctccctgacttaaagtatttcttttcttttttttaagaaatatgaatagaaattaatatattttatgaagtacttaaaaccttaaaaatcatttttctattccaaggatgaaagtgaagaagagaaaaaggaagccactgtaacttaacgtagtgactagtttgggttgctttggtagcttgttttatacaaattgctttctcaaggagaaaagaggattaaaaattaaagcatacaaggactttggagagttctagttagaatttttaagagttagttagctcctttatttttaaggaagcagtatttcagaatcctcctagatggttttcttcatcttttatcctaatgtggtatattttcatgttgaaagattctatatttggttggccttattattcagtcttttttttttaatttttggtattctgtctgctttaggaatttgaagtgattgcccagataaagctcttacagtctgcctgcaacagctattgcatgaccccagaccaaaagttcatccagtggttccagaggcagcagctcctgacagaggaggagaggtgggatcacctgtcgttcatcggggtagaactgaagtgttggcaagaaaaatgctgcatttaatacctcgctgggtcatttattcaacaactatttagtgagcagctgctaggttccaggtccttggttttcaaaggcgcatggtgtggcaggaaaggctgagttgatagcatcaagatgtactttcagactcttgcttggccacttatttatctttgtaaccttgaacaagtcatttgttcttccctatcttaaggatgctcatctgtagaatgtttgtgaggcgtaactaagatcttatgtgggaatgctttgttagaatgcttgtcctcagcgttgtcaccaccaccactgtcactgtgtttgtcattcctgttaattgatggtagctttccaggaagctttcaacctagaggggttgagagactcatgaaactttgaaatatgatgggtaactacattcctacaaaacctatgggaagaattggggaaaataaggaaaatataaaggcattaatatttaggctggctgtaaaggagaaacaagattttgccataagaaccggaagagaacattccagaccgagagagaacacaagcaaaagcttggtggcctgacatgtttggcatttgaaggaacagtgataactcaggtgtggcagggacacaaagaacagtttaaaaatagtgggatgggcatagaaaggcatgttcacttgagtgccctgcctgctggctcagcacgtccctgtcctgtagcctgctcgcttgttggcagattggtctgcaggccatatgtggcccactgcctgtttttacatttttaaatgattggggtgggggggaacaaaaaaagaatattttgtgacacgaaacagttatttgaaattcagatttcagtatctacataaatatggttttattgaaacacagcccgttcatttacatctcatctatggttgctttcatgctgtaaagacagagttgagtagttgcaacagagaccatatggcccacaaagcctaaaatactatgtgatcctttacagaagaagttggcccatccctaccctagcccaggggatttctttggaagtttatcataagggagagtgaaattgacagcaaaataagtatttacaaaaaaaaaaacttgaggtttagagaaatatttgaatgaattaatgacagcatttggattcaaactcaggtctgcccggctctacagcctaagctctgaagatggctgtataatgttgggcacccttccccacctactcagtaacgaaatacatctactgtctacagctacaagctttcataaaaggcacttggaatcacatataaattcctcttgtgcttgtgtcagttatatctgcctggcagatagaggtctgaatctggagcatttttaatttaggaagttttggcaattaaaaatttaaaaaagtatttgtaggccaccctggccaacatggtgaaaccccatctctactaaaataaataaatatatatatatatatctttatcagtaatgtaattgcctatgtctgttcattgacgatcagatagattacaaaagtctcttcattttctttagataaaactaagtcatttgtgcatgtgcacaaacacacatacaaaatagtaggaaggaggtaatagagaagaaataggagggggaggtagtagaggaaggaagattcttccactggcctagcagtgggatgagaatgatcagaatggagttagtttttgatgctgccaaagtgcatatatccttgtatttgaaacacgcagaactaaatagcctcaatccatatgccagtggaggtgagggaggaagcacataagataaatgtgtcaaatcgggccgtgaagtcagtaccccctgacgtttatgataggacaacgtttgtatatatctttactttgaacaattagagccttctctaaaacaaaaccaggacatcatgtgaatttaagtgtgtttttcaattctctaactttgacctcatggagcccccttctctttctcagctatgccctgtcatgtgagattgaagcagctgctgacgccagcaccacctcgcccaagcctcggaagagcatggtgaagagactcagcctgtgagtgtcccctgggggttctggggctccaagagggtgccatcagagtcgtgagaggagatgtattcaacaggatgaccttgagccagggtgaaagtgaagagcactccgctcatttgttaagccgtttatccttctgtcatgaactcaaagcatttgctgagtccattcttctccactcccctctctgttgtgaatcaccattctctcctgcctgaatcactccagtaacatcttcactgtcttctggctgccccttacccaaccattcattctccactaaatagctaggttgtcttttaaaatgtacaccagattatgttgcttcctgtataaaaacccctatagcttttattttaaaataaaacccaaactctgtatcctggtttactaggccttacatgacttaacctgcagacttccctctcttacaacattgccctctgttcaccagtgttgaagacgtttgcactggctgtgcctggcctgaaatgctctttcttcatgactggctccttcaaatattagcaaaaatgttatgtgccaagagagaaccctttctaatgttgctgtccacccctcattctcattcatactagctgcttcctccagtggaatgtaagcaacctgagaacaggaaccttgtctatcatgctcgcagttgtattgcctgaggccaggagtttgagaccagcctggacaatgtagtgagatcctgtctctacaaaaaaatatcacttaaaatattagctgggcatggtggtgcacgcatgtagtcccagctacttgggaggctgaggtgggagggttgcctgagcccaggagttcagtgttacagtgagctatttttgtgccactgcactctagcctggatgacagggcgagaccctgtctctaagaacaaaacaaaacaaaacaacaacaacaaatatatatatatatttatacacacatatatatatacacatacatatatatatgcagtacctagctctcaatatgtgcctgaaaaaccaccattatttttaatgaaatgaatcagttaatatctttttgaggatttggggggatcaggattctgactgtctttatgggcatttgatatttcccagcactgtctctccacctacttcagtgagtcacattgagacacaggcagggatggcacatgaccttgagtgttgccatgtccccggtgtaacataaagacctctgctggatgtggatagcaaggtctcccaccatcagcggccacgcaggctgctatctgccatcaggtgatatgggtggtatgaggcattgtgggtgggttggaacatgcgctttagtagaaagcatctggaagatcatcctgtgttttgctcaccctctctttgttcagatgactgtcctggccctgcggaactctagatttatgagcttttggagtcagctcttgaggagaatttttcatagtatcttgctgtcttttcatctttgcagatatgggggaatgaactactgagataatctgaggggcctgaccaagccttgtcagctggtaagactggcatgtgcacagggaatcagctccctgatagaggagtccagacatgcaggggatcctgggtgtccactctgctcactgaggcagcagaaggaattgggagcttctggacccactatggcagtcagaggttcttaaggaaaaaaacaaaaattctcaatgcaggcaggcctaatcctgcgtcctgctacctctatcctcctgccttctccccatcctcatttctatgctactgcttctctgtactcctctccaagcccgggatctatatgttttgtggtgggagttctaatacccctggatcctctgtcttcactgacacagacaagtggtcagtcctatgaaaacatttactgtgaaatccagagagggcaggactgtgagggtgctatgcccttcacaaagtgtggtaggtactcagtacatctcttactagtaaaatcttgctgggataacccttggtatctgcagttgagtttgggcatctattatgaaagcagttcatatgcccccatcttatttcttgtacatacaagggtgtttgcataccattatttttcaaaagatttcatgatcttcttagcatgtttacaaatctgggaaatgcatttttgctgttcccacattcaatggctcatcattccaaagaggttggagaaaactttgggtgcttaggcctagtttgaaagttagagatgcctactactgagccagaatgaaccttcacaacgcaggacaaagcaggaccttactgaattgtagaaatggaagaaccctagagactctgagataatggatggaggaccactagttgacatcctttcaagatctacctttgtaatttatgaagcagtaagaaagggcattatttttgcttctgtgatcagagtttagctcatacccctatagtccctgtaatgctcctgtaatgcttgaagggtcataaaaggaagacagggaaaatggggctggagatagcagggtagagataaggcagagcaaaaatatgcttgagctcttggaattcaagcatataattccgaaaatatttaataaaaaatcaagttcaccttcattgtttctattattgttgttattttatagtcagtacttgtttaggttcagcccacgtgctagttgccttgcatgccgttccttcttaatctgactcccgccctccttttaccactacttgtggtgtaaatctgttaacggtaaaccttctcagtcttagtctgagaaagtctttattttgccctccttcttagaattatattagacgggtatagaattcaatactgactgttactttcactcagcactttgacgatattattcagtgtcttttgacttccatggttacttttgagatgtgtggtatctgcttaattactattcctctgttttatgttcccactcctgttgcttttctttcttctttccttccttccttccttcctcactcgctctctttctttcaaaagagttttgctctgtcgcttaggctggagtgatcttggctcactgtaacctctgcctcctgggttcatgcaattcttgtgcttcagcttcccaagtagctgggattacaggcacatgccaccacacctgggtaatttttttgtattttggtagagatggggcttcaccacgttgcctggagtggtcttgaactcctgaactcaggcagtcagcctgcctcggcctcccaaagtgctggaagcactttgagagccactgtgcctggccccctgttgattttaagaatttcttttgtctttgatataccagtttaagtgggagtttagtcttaccctattcaggacatggctcttggatgggaggattcctatggttcaccagttctggaatcctctcagccaccatctcttctgatatgggccttcttccatcctctccatgtcttctggaactcctcctacacatacctggggctttcttactgctttctccatatcttttcactgttctttctatgtctttatcttttgatgatgatttttgaggattttcttcagatctgtcatctagttcatgatttttttcttcaagttatttaatccttccactgaggttttagtttaagtcaccacctttttcacttagaggtgaaatgtttttcaaattatcttcttcctttattaggatgtcttgctctgagctccggttttcaatttcttcttttatgtctttaatatttcctaacatacttattttgcagcttggcttatagtagacatgcagatatttgttggatgaataagcacattattagttttgttctgacagttctcaaatttgaagttctcaggagtctaagcctgctttttgttatgcctgttggctctctctttcagtggaatatttccttgtgtgtattttgtaattttgtatcacgagtttatctttatcaggggattctctgaagcctgggctgaaggtatatccctcccgcaagattttctttttttttaagaaaaaatctagtttactagcggtgtcaccggttgagagtttctaaccccatagaccacataaatagcaaattggagtgaggcacagacccagctcacacatgacttcataggagacatttttcttctttccatgctcaggcaagaacagtctccctgttgtcttcctatgctagtagaaagatatttttctggcctatctttttagtaagggtatagccctttgtgggccctggctgtatatagttttggttctaactcctcaccattcataaacggaaaccctcatctttgggccctgggtgtgcattaaaacccatatcactattttgccaagattggggcctcccactcccccaccagagcagctgcagaactagctcgcgtgcttctggttttcagttcctttttcacttaaggcctgtagggatttcccttcctatcttgcaagctcaactaaaaagagtttttaatatttcttatctagctgttttatagaggaagcatttaggatactgtagttcacagattgttggaaatagaagtcttcctccttggtttcttacccaaagcagtgccatcccttctttgcctgtgaagatcattttatggtaggaagtgatgggggtatgctgatggtatcttgatcctgccaaggtggtccatagactgttaaaatgtagaggaccattgacctagaaagacttcagattagtactgaataatctatgtgttctttgaagttggaaatactcttttgggacaagatgtttactactatttgttagaaactttatagcgaatgtcctcctaaaataataatgacagaacacacaagactgaaaaaacatcaagggcttaatcaacacaaaatatttgcctaatcatggattccagatttgtaacagcccaaatgcttggcattctgtttttttccagactgtttctagggtctgacatgatcaccagtcccactcccaccaaagagcagcccaagtccactgccagcgggagctctggtgaaagcatggactctgtcagcgtgtcatcctgcgagtcgaaccactcagaggctgaggagggctccattactcccatggacacccctgatgagcctcaaaaaaaggtatatactcaacccttctcataattcctaatgcaggcacctacatgctctttgccacaccacagcaaggaatgtctgtttttaagtggatcactctatagtattttgaaagtcatgttttgaacaggcatcaaaagaagagttcaatttggggacatactactaatagaaacaggtgtaaaagcactaagcagtttcgtttattcatttggcctttgaaatattgttctatacccacctcttaaggcactggagttatttaggggaagtaggacttcttagaaagagcaaaaagtcagagatggagatgtgtcaggttcttggtgccatgttttgtcttagccaagcatttatcacaataatgttgcattgcatgccactccaaaagtcagtgacttaaaacaaccactatttatctctcttatgtatctgctggttggctgatctaggttgggcttgacactaggccacagatttggtccaggtctgttccacttgcctctcattattgttggagtaacgggctacccagggcatgcccttagcatgctaagacggacaagcaagagggcaagcccactcgcaagcatatgtcaagcctttacttgagtcgtatcaaccaacattctattggctaaagtaatcatgtggccacattccacataagtaaatgaagcagagaaataggctccagttttagtgggaggaactctgaaatcacagtgcaaagggcacagctgcaggggaagatgagggattggtaacaaggatacattctcccatgttggaaaaaaggaaactgatgagaggtgataaaagaatttccgtcgagtttctattttctgtgactgcataaataaaaatttaaaaaccaaaatatcttaatcttaagatcttaattaagaccagtcttcttttttttttttttttttttttttttttgagatgaagtctcactactctgttgcccaggctggaatgcagtggtacgatcttggctcactacaacctctgtcttctgggttcaggggattctcctgcctcagcctcccgagtagctgggattacaggcatgtgccaccatgcccgcataatttttgtatttttagtagagatggagtttcaccatgttggccaggttggtctcacacccctgacctcaggtgatccacccacttcggcctcccaaagtgctgggatgagccaccgcaccccaccaatatcagtgttaatcttctgtacacatctgcttcaatctgttggttgaagggtttggatcagaaagtcaactatgacataactagaatttgcaccatttggggaaggtttctggctaaccaagcttactcaatagtgacttctggctccttagcttatggttaggtcagtaaggtagaatgttggcaatggtttcatcccttggtttatatctgctgctcttcaaggggacatgtgtgttgcttcacatggtgttaaaacaacagtggtaatcctggaaccctcaagtgactttgtcataatgtagccaatccaggaaaagcatcatattcaggattcatcaaactgagatgactaatttgctgctctagttggatttcttagctttctgctttgaaatccaggggatacaatcattcatgctctaaatattgaaagaaagccttcgtggacacctacggactggccatgctctcaaaaggcatttttcctcaacccgggatgtagtcattcttcgtgacttgacatacaaattagctttgtcaaaatctggaatgcagtctcatcattcactttttcacagcctctgaggttttataggctccatttctgatggtagacattgtaggaaagtaataactgaggtattgcccacattattgtgggatttctccctgtctctccaggaaggagatggaatcacagtcacaccttgtggcatagtggaaatgtacattggtccaaatggtaccttttaaaactatgcagaagcccagtgtgctttctcctgcacatcccttgcttcatcttttttgtctcatccctcatcagactggctttttaaattcttgcagaagtcatggctctttattctttggatgaacctttctcagagtcatacatttcttaaacatcagtgattcacttggatgcaagtagctcctggactgcacaatccctgcatattagctagaaaggctcgtgattctcctgcttggcacatagctggactgagctgacctccacacttccttcctgacctgagagcctgtgacagccgccttctccaaaagtcctccagactgtcattcttccttttccacaggctgcactgtgaggttgctcttaagggtgaagtgtaatttatttgcattcctttcttcattccccgatcatgatttctaaatattgatttttgcacttgctcctcacttcttaaattctcaataggaatttgggggctcatcaggcagtctgtttagagctgctataacccaggcatattctaggctttatcttaactataaatgtcactagaatcatagaaaaatctaacaaaggaaatagagtttggatagaggaacatgaaggcgaaaaaattgaatgaataattggaaaatgcacccccttaactaatatatctgcaaagaaacttatgctattaacttatctatcatcagttagtcctcaaattgagccactaagttgattcatttgggaacataaggaagaaaaaaacccaaaaaccaaaacaaaaactaaaccatattatgatagagccacaatcagacccctacccatgagaattgtcacatcagctggctggctgtaaactaactgtgcaatagaactgaatgtataattatgccacaggaggaaatctacaggaaataagataatagactccattttaatcagaagcctgataaccagaaagctcaacttctatactgtttccatggaaaggcagataaatatgaaagaaatgttatttattttataaatgacttccagaatattttataggattaacatggtataatttagcttaagtcattccgggaaattctttataattttctacaataataatgggtattttaaatggttcaatttaatgatttttaaaagtacctcttccaataacttctttctttggttattggtattgcatggatgagaaatgtgtagttaatcagaaaagcatattaactgtagtactccatttcttaattgtccttgatacacatcatgaaaatgtatacagttggctctactagcaaatgtggaaagtggtgaagctgcttaaaggctgtatttcccttgagcaagtcacttttatattctgaatcttattctcctcgtctttataatgctctgcattttgttcacaagacagttgtggaattaaaatgggataagataatatgaaagttcatgataagcctcacagtactaaacataccgaggtagcagcatactatgttgattcatcttattgtcatcagccacaggctgagccttggccatgtgcttgctctgggaactcgacagtgggaatcagggagcttgggttcctgttctaggggtgctgtcaactagctgtgtggacctggagccccagttttctccctgggtctcaggttcctcagcagaacaggtatgggactagttgatgtccaaggcctttctagcactaatattcaatgcagagccgtataatctggggtacttctcttagaaacttctaaaaatacagaactttctctctcactacgaaatctgactgcagtaggactgaatcaactgcgttggcaaggctttcctccagccccgtaagcttctgacttctttgggaacccatattgcctccagtttctggtgtctgctgccacctgctggttaacttctataagaacagctaaaacctagggaaatagaactgctttgcctcacgtgcttatagagtgattaggtcacactgagtcaccgataggcatctaccactgatggggactcagagtacttacaccagggatgagacacatgtgtgctgtgggctgttgtggaggaaataactgcagtctatcagtcttgatatctacctctgctttgaaaattgcaaagctgttggccagcgttctaatctgttttcttctggggtgtgtttactcttccagctctctgagtcctcctcatcctgttcttctatccattccatggacacaaattcctcagggatgtcttccttaatcaaccccctctcctcccctccgtcctgcaacaacaaccccaaaatccacaagcgctctgtctcggtgacgtccattacctcgactgtgctgcctcctgtttacaaccaacagaatgaagacacctgcataatccgcatcagtgtggaagacaataacggcaacatgtacaagagcatcatggtgaggagcaagccctgacccaggagcgggtttccatttagattgtgtgtctgtgtctgtcggccgctcagactaatagccctaaatatgcacactcaatattagcatatacatatatgcattcacacagaagggatgtgtgtcagttccaggtctccctgggcatagatgctgaatgatatatgtatataaaatatatatacatatatatgcacacacatggtgtatataggatataattttcacatcttaaagaaatgctaaaacttattcgtttaggtcagtattagccatttgaaaattctcaatttgggtgacagtgtaaatgtgctccagggaggatgacacaacctcacacatttttggaagccttcctatggaattatatgtctggttttatcattgaatttccacacattcttagcagtgtactcccctgatggcagatttttgtcatttagtcatttggatcaaacctagttaataaagtggatgatcaagctagaaatacagtttgggttaatgaggaacgatgcctataaaatgagactgacctttttgagcttcttgtaaaatctgtgtgtttctgaggacaattgcaaagatatttttaataatggcagtcttttgggaatacacacagagcctctcatggcgataaccttgggtatgtgaggtctggtaggtttatcacaagaatataaactccttagtttatgggagataatcatgtattggaaatcactttatcctttgcagcaaaatcccacagctaattccacatctctcctcatctttatcactcgcctctttgaaggcacactcagtgcttacaagctcaggtctgaatatggcataagtggtatggaggctccacataaaagctttgctaaagcatttattgagtcaacaaaatatcaaacatttattgcgttctagtcattagatcaggctttggggatagggagatgagtgagacatttctgcctttgaggaacttttaattagaaagggagcccacaaagcattattcacaatgtgcaaaataatagagccaagatcaggtggtaaagggccttgtggcccacacagaggagtgtgttaatcccgcaggcaatagggtcttgttgaaggcttttaagtagtgatgggatttgctcattaagaaagtcatggcactgtgtttgctggagtgtcggggtagactggaggcggggaagcaagttaggaagctgctatcatgttccatgtaggagaggataagggcttgaatgacggtcatgtggctggagatggtgaggatttttgaaagcttttgatgaggtagaattgtagaatccattcatttagttaccaactttttggttactgttgtggaggactagaggctgtctgggtagttggtgggtctgtgagatatgaactaccagaggaggatattcagggacatttaaatcagaggtaccagtatgacatcagatggcattgtctgatagatggtcagaaacatgggctggtgcaaggctggtgctgagatcaaatactgggagttgtcaaaccccacaggggggacgtggtctcgcgagactgagtgtaggatgaggcagaatgcaagtggtaatgagggaggggctaataaaggagcacccgagaggtagaggaaacacagggaagccaaggtcctccatgtggttactgcctgctcagcatggtctgttcacctggcacctcttacctgcaccaatcagagagaatgtccactgcataactctacagtgtctctgaattatagcatggatttgtacaccaaacagttatgttttgggacatgcctggtcagcgtgcactctgctcagtctggggggaactgtgagtggttggactgcacaaacctctactgcccaggaggagtcacaggttgtgcatgctgtctgagtgttgggagggtagtgagcagaagatcccctgccccctgctctgagattcctccttccccagcaaatgggctgcctctgtgagaatcacctctcctgccaaccccttcctgtggccctttatattgcaccaggtggtggcactcacctttcatgaaaatcctgccagcgcatgtcacaggcttattctggagagacgacacactgctctcgtgctctcattctaatcgttaggcctctcaggagaaaccttgctcacaggacgtacctttctgaaatgtattatgctgtgtgctgttgaccagaagatggaaataaatcagtccaggttcaggcgagactagcagttctcaaactttttgttctcaggacccctttatactctgaaacagcattgaatattccaaagagctccagactatgtgggttgtatctgttgatatttaccacattagatatttaaactgagaaactttcaaaatgttgattaattcatttaaaataacaataatgaacacattgcatgttaatgtaaattttattttttaatgaaaaatatctatttttttccaaaaattattgagtgagaagtgtggcattgttttccatttctgaaagtctgttaaaatgtgagtgagactggctttgttttgttttgtttttgtttttactgtgagtacagggtactgaagaatacagtgacagctagtagacttgtagttagaaaccactggaccgatttgtgctgttgtgccagcaattccatccaccatagcttctgcaatacctatgcaaatgtcaacacaaagaaaagacaaacagcatcttagtattatcatgaaaataattttgatctcatggatcccctcacagatttcagggaccccacgggccatagattgcacactgagaactggtggcctagagaacttgctttgcaagagcaactaatgtccctggaatccaaggcccttccatagaagaagagacagcaattagcccttgtaaaattacctcctcagtgaccatggaaaaatgtcttctaccactgaacccatcactctttcgaaatgatctttctctccattgtgtcaatcacagagtcagtctcccaagatcccttacacagggaatgcagtatttctgtcacaggaaagtcaatgagggcgacaccaaagcatcgttcagtaccgcgcattcagtacagcagccactggccacgggtggcgatggagcatttgaaatgggaatactccaaattgagatgagctgagggtaaaatatataccagattttgaacacttagtacaaaaaagtaaaatactgcattaacaatttttgtattgattatatatgctgatgtaatatttggggtgttcaagttaaatatcacctttcaaaaactttttttttttttgaggcagagtcttgcactgttgcctgggctggattgcaatggcacgatctcagctcactgcaacctctgcctccctggttcaagcggttctcctgcctcagcctcctgagtagctgggattacaggcacccacgaccacgcctggctaacttttttgtatttttattagagacggggtttcaccatgttggccaggatggtctcaagctcctgacctcctgatccacctgcctcggcctcccaaagttggtgggattacaggcatgagccacctcacccgtcctaaaaactttttaattgtggctactagaaacttaaaatgaaatatgtggctcacattcgatacctatgagtgctaattcagtctatcagcataaggatgcacgcttgagctgtgaatactcattgtaatcataagtttgattcagcatcgctttgatggtacaaagtaataaacacgcaagggaaagcccttggtcatcttgtcttcattgggacatacctggggaagtttaaggaaaggagaatgaaggtagcctggctgtctcatatgacttacccaccttagcctgacatgcatcccctgaagggaggtcttctcctttagctttctgctactagtccagtgtgacccagctttgggagtattttcttcatactatcaaaaacatattttcctcatttagaattttgtgtgcacctacttttcccttgtaaatgaatatgccagatgttttggtaacagacacgtgaacaagatctttgctgcttacaaggacccctttgtaatgcacattgtttatggaatcacaaacaccagctgctgccccagatcagagtgaggcatcttggcactgccatcctcaggcacacaatggcagtttctgggaggaaatgagacttctgtatgtgtcgaggggggtcgtggggggctttctttctatagtcctcttgccccctggtgagaacagcttttatttttaagtaagaataatctgagttttcattcacttctttcaaacttaaagaaatcacccaaggtatggtacataatttagctttcttttcaggttgctctgcacaccctgcaaatagttggctggcaggcagtgaggtgaagggaagaacatcagaattggggacgagggaaacctttaacttgtgcttttaaaacacttacaagctgatgtttattgaagcataatttgcatgtagttacatatgcagatcttaaatgtttgattctttgagttttaataactatatatatctatgaaactactaccccaaatctagataaagaacatttccatcctgcctgccagattccctgtgccctttccaatcaatcccctcctaacctagaggttcattttctaatgccacagattttgtttttcctttttttgaaagaatagactccactggtatgtaatcttttgtgtccggtttcttttgcctaagatgatgtttgtgagattcacctgcattgttgcatgtgccagttcttagttcccttcagttgctcagtaggattctattatgaatatactacgatttattctcttttcctgttgatggagattcagattgattcagtttttagctattgtgaataaatctgctatgaatgtttgtgtacaagtccttttgtggacgtatgtttttattccgcttggtaaatgcctaggagtgggactgctgaatcacagggtcacctgtactttttgaaatggtcaatgggcagaactgcgaccatttttatcccgtgggttgtaaccagtgccatagaagcagttcaacatgggaggataattttgggccaggactaataatgctttgcatttttcacaattccctcatatatattctttcacgggaacttcaaccactgtggaggagataggcaaggaaagcgttctctccattttaatagcggatgacgctgtgactcagagattaggtgactcgcccatcatctgtggctgctaagggtagaaccaggactagaaaccagggatcctggctcttggtccagttccaattccacgagtccgttctttctggaaaggcatcacaacacaagacagcaagaatgagagggtcaggagaactccctcaggaaacgtgaagctaagtactttacaaacctgttcattgtctttgcagttgacgagccaggataaaacccccgctgtgatccagagagccatgctgaagcacaatctggactcagaccccgccgaggagtacgagctggtgcaggtcatctcggaggacaaaggtgggcatccttccgagacaggcatgttccttcccagggcaggtggctagcacatgtccacagtgctccgcgtttagaaggcagaaaacggatacgtattgttttattgggacctagtggtggtttttgatagtgcaagggtgaacaaccgtgccatcacctcacttgtggaattaagtatctcaaaccgctctccgattccccagctcttgtttttcctgcgattttgatgagtatttcttctgcccagtctttctgagctcttcaaacacttttctaggaagaagtgtctccctgtgccaggaggcagagggtaggggagtctgttgggcattgcaggtggccacacacctcctttacccaagaatgtgtttctaagttgtgtgtgaatctgaaatttagtggttcctgtaataatttctcatcatttcaattaatcatgtatgaaaggtattttctttattcatgatcaattttaaaataacacaaacctctaacttgaaggttatttacctcacatttattgaggcaaagaactggtaatctatgaaaggcttcaatatgcctgggaacatattatttaaagaaatctcttttatgaaatactttttgggggaaataatcacccttgcatgtatctgtctgctaatatgaatttggggattgtatttgttgagagaaggaaacaggctggtagaaaactcctctgtaccttgtcacttcacagacagtgactgtcaggataggtctcttctccaagtgcagaaggagcagcaaatattgttgaccgaagccaaccctttctgccgccagaccccaaactgtccattgcagccaccttaagtagtcctctgctcaccaacaagcagtgtcccctataagtgagaagcattccacaagctaggctatgggatcagcatgtcacccagggctctattgctggtttagaggagagtggctgaaattagaatactaccttctcctagagattaaaagctacagcctctgggaaaattctttttcagtttcctcttggaagatttctcattcattcagctgagccttaggctgtggggcaacactttctcagttataaccttttgatgtaattataattataattctaagcctaaaagatggtctcaagttgtaccattttgcttacaacacagcactaaggtgaggctggtgggtctaaaggtccaggagtctcgaggggtagccaggacccagtgttgcccaccagctgtgtggtcctaaatgcaagctgctggacccccgggccttggtccttaattagagacaataccctgctggttcctcatatatcacagggcgattctgaagataacaagaaatcgtgtacctgaacatggggagacactaagtgatatataactgtgaggactattattactgacctgtgagtatgtgggcagcagcatgggacactttgaggggattgttctccgctgagcctttgtgcacagaatgtacaggagtcacttggaacctgctcatatcagtcttgttgttggatatcaatgtttgaagttaacttaagactcaatttgtccagttttacaaccatatgcctctctggttgcctccccgaccccactaccacagagctagacttgcacattttaccttttttaattctgtttgttttttcaaatactcattacacttgagtgctaaatactgtataccttcttgtggcgattactcaaggatctagaaccagaaatgccatttgacccagcaatcccattactgggtgtatacccaaaggattataaatcattctgctataaagacacatgcacacatatgtttattgcagcactattcacaatagcaaaacctggaaccaacgcaaatgcccatcaatgatagactggataaagaaaatgtggcacatatacaccatggaatactatgcagtgataaaaaaggatgagttcatgtcctttgcagggacatggatgaagctggaaaccatcattctcagcaaactaacacaggaacaaaaaaccaaacactgcatgttctcactcataagtgggagttgaacaatgagaacatgagaacacatggacacagggaggggaatatcacacaccggggcctgttggggggtggaagactaggggaaggatagcattaggagaaatacctaatgtagatggcgggttgatgggtgcagcaagccaccgtggcacatatatacctgtgtaacaaacctgcacgttctgcacatgtaccccagaccttaaagtatagtaaaaataaaataaaaattaaaaaacaaaaataaaagtgaggctgggcatggtggctcacgcctgtaatcccagcactttgagaggccgaggcaggtagatcatctgacgtcaggagttcaagaccagcctggccaacctggtgaaacccgcctctactaaaaatacaaaaaaatacaaaaaaaaaaaaaaaaattagccgggggtggtggcacacgcctgtaatcccagctacttggggggctgagacaggagaatcacttgaccctgggaggcagaggttgcagtgagctgacattgtgccactgcactgcagcctgggcaacaagagcaaaactccatctcaaaaaatataataataataaataaataacttaaataaataaaataaaactgagtcaaaataactttgctttgatgatttcatattacacttggaacaatccttgttcaaaaattacagatgtctagttgggaatcattgaaattgaaaatagtttaaatattaaaagaaggggatatttgctgcaatatttgctgctccttctgcacttggagaagagacctatcctgacagtcactgtctgtgaagtgacaaggtacagaggagttttctaccagcctgtttccttctctcaacaaatacaatacccaaattcatattagcagacagatacccaggaaggggagcatcacacactggggcctgtcagggggttggggaaaaggggagggagagcattaggacaaatatctaatgcatgcaggacttaaaacctagatgacagattgataggtgcagcacatgtatacctatgtaacaaacctgaacattctgcacatgtatcccagaacttaaagtaaaatactataaaataaagatatgcacgttcagcacatgtatcccaaaacttaaagtaaaatttttttaaaaaaatatacatactttcctacatgggaaataaaatactcgtttgacgggattacttcaaaaaatatttcaatatttcaagtagaattctggagtgctgtagattttctgttttttctatgtcattggattctcttagtctttgagaaaatctgcatactggggtggaaaatggactgcaggagaaacgaaacccgagttcaaatcccagttctgctattcactagctgccatcttgggaattttctttaacttttcttggcctctgtttcctactgtactttttttctagttttaacattttctattggaacatttaattcatggagcgaatttctaaaatctcatttgtactaattttttaaattgggattgagaagctggggccaatttttggggtagtgatggtgatcactgtctggttcaggtcacattccagagatgaagggccgtagtcccgttcttgtgtctgggcaaggtttacagctgccgttgtcagtactgagctgacctccacaagctgaccatcttatctttccttatctttttcagaacttgtgattccagactcagcaaatgtcttttatgccatgaacagccaagtgaactttgacttcattttgcgcaaaaagaactccatggaagaacaagtgaaactgcgtagccggaccagcttgacgttgcccaggacagctaaacggggctgctggagtaacagacacagcaaaatcaccctctgaagggagggaccagtggccccttgtttgccaaaggcagagtggggctgagaaacaggctgcggtgattgcaattaccatccggtgttcgaggatcattggtgaagtcagcagatatttattgagttcctgtggtgtgcaaagcattatgataggcaccgtggggaaactggaaatgaatttgacatgaaaaggatgaacgattcactgattctctttgactcatttgagactaaaatgcagaattaccaacatttaaaacatatatatgcacatgtatttggtatgcatgtgtatctatataaaaatatataagagggactttatgggatagtatggactatggaaaaacaaatttgcacaatggcctgggaagttgaggtcactttttacagggaaatagaagaaactgagaacctagtctcgtatattctgagtaaatggaatcagtcctgggaatagagagtgtcctttgtgccagtattacaagaagcccaaactttatttttataaagggagaggatgactttctcaatcaagtgccaccagataaaaacaactgcagaggctggaactgccacaggctgtatgaaaggccactttggaaagggtttggatgagctggtggccttcaacctctgcctgcatctgccactttctgctaccctagggaggccaggaggagcttcggaggaccatcgccccactggtctagccatcatgacacctctggaggtgtcaagctcctgaaacaagctcatttcagtttctggcaaccccgtgtatttccgttttccccctaaagaacatatcataatcattgcacaaataaccatgttctttggtaatgaagccagaaaagaaagcgcaaaagaatggtgactcatttggactcttatctgtcttggaatgtcactgcttcattgccttctctgattgccttttgcatgtaaaactatgtgtctggagtcttttgccatctggatcttagtacctctttattatgtgcaatttattcctcaggtgtggaaatttctactgcaattgactacgtttgattattttgagcttgtgaaagatttctgaacagtgattgtcccgttaatagcccctcagaagatgttccctgctgataacagcatcctattttacttacttttatagcattactgtgcctagtcgtggggaaagagatggggctgtatagattatctgaatcatttgtctaagaggtacattcttccagatggaatcaataacttttttttttccaggttcccgtgcttgctatcacagtatcattgttaagtgacacttttgtctctcataacaccatcacactcttccttccaagtctgagctgtgctggggtttgaactaaaagccatatgtggaatattgacatgtgtaagaagcactttcagaatgttgtcctttttaagaaatgattctcaaaataccagtttttattccaaaaatttagagaacaaacccggaatatgaagtgcagattgtaacatggagctatttttttttcttaatcccataatacagctcctaaaagttgtgtgggatttgcgttgcataaatagccatgtgaattccacaagaagcaccagggaaagtttagagatttgcggcaatggaccgaagaacgggccaggaagtcctccaatttcctttggtctttccaggagattggactacacattgtaaagactgactgggtttcaactagtcaaaaagcactttcttctgttttcaatccctgttcgatttgtgcttctgtgcttgtaggagagatggccagggtggcagccctcatgcaggttgaagtatatgtagcctcagcctgatattcttggtgcgaaggtaaaaaaaaaaaaataaataaaaccattggcctggttgagggcgtgaccaccaagacatatatgttgtgcccgtgttcatcctgtgtatttatactgtatatgtagagtctagatttatatactgcaatgtaaaatatatatatatttaccttttttaaagacaatggaaattccaagtagctaaaacttagcttcatttatttaatgccactttaaatgtcttaaatttgtttcctggtggacagccgggtaatgcttttagctgctcgcatgcttgtctttctgcatctccatcatctgtttaccttttggttaaactaataaactagtttgggacttggctggcatgtgctgccagacccaaaggga

SEQ ID NO: 228 - DNA, 4690 bp, Homo Sapiens
acacagatccgtaatgcctcctgcctgcctctttcaagatggaggtgaaacctgtgggagaacctactcaagaggtgtctaaattcaaactttccaccaaggtagaaagcacgggacactggctggtggaagatcatgttcgaatatgggaagttttaaagacagaggagagctcgattcaggactggggtgaagaggtagaggaaggagctgtttaccatgtcaccctcaaaagagtccagattcaacaggctgccaataaaggagcaagatggctaggggttgaaggggaccagctgcctccaggacacacagtcagtcaatatgaaacctgtaagatcaggaccataaaagctggcaccttggagaagcttgtggagaacctgctgacagcttttggggacaatgactttacctatatcagcatctttctttcaacgtacagaggctttgcctccactaaagaagtgctggaactactgctggacaggtatggaaacctgacaagcccaaactgtgaagaagatggaagccaaagttcatcagagtccaaaatggtgatcaggaatgcaatcgcttccatactaagggcctggcttgaccagtgtgcagaagacttccgagagccccctcacttcccttgcttacagaaactgctggattatctcacacggatgatgccgggctctgacccagaaagaagagcacaaaatcttcttgagcagtttcagaagcaagaagtggaaactgacaatgggcttcccaacacgatctccttcagcctggaagaggaagaggaactggagggtggagagtcagcagaattcacgtgcttctcagaagatctcgtggcagagcagctgacctacatggatgcacaactcttcaagaaagtagtgcctcaccactgcctgggctgcatttggtctcgaagggataagaaggaaaacaaacatttggctcctacgatccgtgccaccatctctcagtttaataccctcaccaaatgtgttgtcagcaccatcctggggggcaaagaactcaaaactcagcagagagccaaaatcattgagaagtggatcaacatcgctcatgaatgtagactcctgaagaatttttcctccttgagggccatcgtttcggcactgcagtctaattccatctatcggttaaaaaagacttgggctgccgtcccaagggaccgaatgctgatgtttgaagaactttcagatatcttctcagaccataataaccatttgaccagccgagaactactgatgaaggaaggaacctcaaaatttgcaaacctggacagcagtgtgaaagaaaaccagaagcgtacccagaggcggctgcagctccagaaggacatgggtgtgatgcagggaactgtgccctacctgggcaccttcctgactgacctgaccatgcttgacactgcccttcaggactacatcgagggtggactgataaactttgagaaaaggagaagggaatttgaagtgattgcccagataaagctcttacagtctgcctgcaacagctattgcatgaccccagaccaaaagttcatccagtggttccagaggcagcagctcctgacagaggaggagagctatgccctgtcatgtgagattgaagcagctgctgacgccagcaccacctcgcccaagcctcggaagagcatggtgaagagactcagcctactgtttctagggtctgacatgatcaccagtcccactcccaccaaagagcagcccaagtccactgccagcgggagctctggtgaaagcatggactctgtcagcgtgtcatcctgcgagtcgaaccactcagaggctgaggagggctccattactcccatggacacccctgatgagcctcaaaaaaagctctctgagtcctcctcatcctgttcttctatccattccatggacacaaattcctcagggatgtcttccttaatcaaccccctctcctcccctccgtcctgcaacaacaaccccaaaatccacaagcgctctgtctcggtgacgtccattacctcgactgtgctgcctcctgtttacaaccaacagaatgaagacacctgcataatccgcatcagtgtggaagacaataacggcaacatgtacaagagcatcatgttgacgagccaggataaaacccccgctgtgatccagagagccatgctgaagcacaatctggactcagaccccgccgaggagtacgagctggtgcaggtcatctcggaggacaaagaacttgtgattccagactcagcaaatgtcttttatgccatgaacagccaagtgaactttgacttcattttgcgcaaaaagaactccatggaagaacaagtgaaactgcgtagccggaccagcttgacgttgcccaggacagctaaacggggctgctggagtaacagacacagcaaaatcaccctctgaagggagggaccagtggccccttgtttgccaaaggcagagtggggctgagaaacaggctgcggtgattgcaattaccatccggtgttcgaggatcattggtgaagtcagcagatatttattgagttcctgtggtgtgcaaagcattatgataggcaccgtggggaaactggaaatgaatttgacatgaaaaggatgaacgattcactgattctctttgactcatttgagactaaaatgcagaattaccaacatttaaaacatatatatgcacatgtatttggtatgcatgtgtatctatataaaaatatataagagggactttatgggatagtatggactatggaaaaacaaatttgcacaatggcctgggaagttgaggtcactttttacagggaaatagaagaaactgagaacctagtctcgtatattctgagtaaatggaatcagtcctgggaatagagagtgtcctttgtgccagtattacaagaagcccaaactttatttttataaagggagaggatgactttctcaatcaagtgccaccagataaaaacaactgcagaggctggaactgccacaggctgtatgaaaggccactttggaaagggtttggatgagctggtggccttcaacctctgcctgcatctgccactttctgctaccctagggaggccaggaggagcttcggaggaccatcgccccactggtctagccatcatgacacctctggaggtgtcaagctcctgaaacaagctcatttcagtttctggcaaccccgtgtatttccgttttccccctaaagaacatatcataatcattgcacaaataaccatgttctttggtaatgaagccagaaaagaaagcgcaaaagaatggtgactcatttggactcttatctgtcttggaatgtcactgcttcattgccttctctgattgccttttgcatgtaaaactatgtgtctggagtcttttgccatctggatcttagtacctctttattatgtgcaatttattcctcaggtgtggaaatttctactgcaattgactacgtttgattattttgagcttgtgaaagatttctgaacagtgattgtcccgttaatagcccctcagaagatgttccctgctgataacagcatcctattttacttacttttatagcattactgtgcctagtcgtggggaaagagatggggctgtatagattatctgaatcatttgtctaagaggtacattcttccagatggaatcaataacttttttttttccaggttcccgtgcttgctatcacagtatcattgttaagtgacacttttgtctctcataacaccatcacactcttccttccaagtctgagctgtgctggggtttgaactaaaagccatatgtggaatattgacatgtgtaagaagcactttcagaatgttgtcctttttaagaaatgattctcaaaataccagtttttattccaaaaatttagagaacaaacccggaatatgaagtgcagattgtaacatggagctatttttttttcttaatcccataatacagctcctaaaagttgtgtgggatttgcgttgcataaatagccatgtgaattccacaagaagcaccagggaaagtttagagatttgcggcaatggaccgaagaacgggccaggaagtcctccaatttcctttggtctttccaggagattggactacacattgtaaagactgactgggtttcaactagtcaaaaagcactttcttctgttttcaatccctgttcgatttgtgcttctgtgcttgtaggagagatggccagggtggcagccctcatgcaggttgaagtatatgtagcctcagcctgatattcttggtgcgaaggtaaaaaaaaaaaaataaataaaaccattggcctggttgagggcgtgaccaccaagacatatatgttgtgcccgtgttcatcctgtgtatttatactgtatatgtagagtctagatttatatactgcaatgtaaaatatatatatatttaccttttttaaagacaatggaaattccaagtagctaaaacttagcttcatttatttaatgccactttaaatgtcttaaatttgtttcctggtggacagccgggtaatgcttttagctgctcgcatgcttgtctttctgcatctccatcatctgtttaccttttggttaaactaataaactagtttgggacttggctggcatgtgctgccagacccaaaggga

SEQ ID NO: 229 - protein, 803 aa, Homo Sapiens
MEVKPVGEPTQEVSKFKLSTKVESTGHWLVEDHVRIWEVLKTEESSIQDWGEEVEEGAVYHVTLKRVQIQQAANKGARWLGVEGDQLPPGHTVSQYETCKIRTIKAGTLEKLVENLLTAFGDNDFTYISIFLSTYRGFASTKEVLELLLDRYGNLTSPNCEEDGSQSSSESKMVIRNAIASILRAWLDQCAEDFREPPHFPCLQKLLDYLTRMMPGSDPERRAQNLLEQFQKQEVETDNGLPNTISFSLEEEEELEGGESAEFTCFSEDLVAEQLTYMDAQLFKKVVPHHCLGCIWSRRDKKENKHLAPTIRATISQFNTLTKCVVSTILGGKELKTQQRAKIIEKWINIAHECRLLKNFSSLRAIVSALQSNSIYRLKKTWAAVPRDRMLMFEELSDIFSDHNNHLTSRELLMKEGTSKFANLDSSVKENQKRTQRRLQLQKDMGVMQGTVPYLGTFLTDLTMLDTALQDYIEGGLINFEKRRREFEVIAQIKLLQSACNSYCMTPDQKFIQWFQRQQLLTEEESYALSCEIEAAADASTTSPKPRKSMVKRLSLLFLGSDMITSPTPTKEQPKSTASGSSGESMDSVSVSSCESNHSEAEEGSITPMDTPDEPQKKLSESSSSCSSIHSMDTNSSGMSSLINPLSSPPSCNNNPKIHKRSVSVTSITSTVLPPVYNQQNEDTCIIRISVEDNNGNMYKSIMLTSQDKTPAVIQRAMLKHNLDSDPAEEYELVQVISEDKELVIPDSANVFYAMNSQVNFDFILRKKNSMEEQVKLRSRTSLTLPRTAKRGCWSNRHSKITL

SEQ ID NO: 230 - DNA, 4707 bp, Homo Sapiens
accggcggcggcgggggcagcgcggcgcgtgtctgtgcgctgcggtcgctcgggaccgggaccggggcgaggcgccgcggggctgagcccagcagacattgcgttggcctccgagcagggcgcatcatgcagcgttcgcgcaccggagagaaaactgagaatgaaattgctttggcaagctaaaatgagctcgattcaggactggggtgaagaggtagaggaaggagctgtttaccatgtcaccctcaaaagagtccagattcaacaggctgccaataaaggagcaagatggctaggggttgaaggggaccagctgcctccaggacacacagtcagtcaatatgaaacctgtaagatcaggaccataaaagctggcaccttggagaagcttgtggagaacctgctgacagcttttggggacaatgactttacctatatcagcatctttctttcaacgtacagaggctttgcctccactaaagaagtgctggaactactgctggacaggtatggaaacctgacaagcccaaactgtgaagaagatggaagccaaagttcatcagagtccaaaatggtgatcaggaatgcaatcgcttccatactaagggcctggcttgaccagtgtgcagaagacttccgagagccccctcacttcccttgcttacagaaactgctggattatctcacacggatgatgccgggctctgacccagaaagaagagcacaaaatcttcttgagcagtttcagaagcaagaagtggaaactgacaatgggcttcccaacacgatctccttcagcctggaagaggaagaggaactggagggtggagagtcagcagaattcacgtgcttctcagaagatctcgtggcagagcagctgacctacatggatgcacaactcttcaagaaagtagtgcctcaccactgcctgggctgcatttggtctcgaagggataagaaggaaaacaaacatttggctcctacgatccgtgccaccatctctcagtttaataccctcaccaaatgtgttgtcagcaccatcctggggggcaaagaactcaaaactcagcagagagccaaaatcattgagaagtggatcaacatcgctcatgaatgtagactcctgaagaatttttcctccttgagggccatcgtttcggcactgcagtctaattccatctatcggttaaaaaagacttgggctgccgtcccaagggaccgaatgctgatgtttgaagaactttcagatatcttctcagaccataataaccatttgaccagccgagaactactgatgaaggaaggaacctcaaaatttgcaaacctggacagcagtgtgaaagaaaaccagaagcgtacccagaggcggctgcagctccagaaggacatgggtgtgatgcagggaactgtgccctacctgggcaccttcctgactgacctgaccatgcttgacactgcccttcaggactacatcgagggtggactgataaactttgagaaaaggagaagggaatttgaagtgattgcccagataaagctcttacagtctgcctgcaacagctattgcatgaccccagaccaaaagttcatccagtggttccagaggcagcagctcctgacagaggaggagagctatgccctgtcatgtgagattgaagcagctgctgacgccagcaccacctcgcccaagcctcggaagagcatggtgaagagactcagcctactgtttctagggtctgacatgatcaccagtcccactcccaccaaagagcagcccaagtccactgccagcgggagctctggtgaaagcatggactctgtcagcgtgtcatcctgcgagtcgaaccactcagaggctgaggagggctccattactcccatggacacccctgatgagcctcaaaaaaagctctctgagtcctcctcatcctgttcttctatccattccatggacacaaattcctcagggatgtcttccttaatcaaccccctctcctcccctccgtcctgcaacaacaaccccaaaatccacaagcgctctgtctcggtgacgtccattacctcgactgtgctgcctcctgtttacaaccaacagaatgaagacacctgcataatccgcatcagtgtggaagacaataacggcaacatgtacaagagcatcatgttgacgagccaggataaaacccccgctgtgatccagagagccatgctgaagcacaatctggactcagaccccgccgaggagtacgagctggtgcaggtcatctcggaggacaaagaacttgtgattccagactcagcaaatgtcttttatgccatgaacagccaagtgaactttgacttcattttgcgcaaaaagaactccatggaagaacaagtgaaactgcgtagccggaccagcttgacgttgcccaggacagctaaacggggctgctggagtaacagacacagcaaaatcaccctctgaagggagggaccagtggccccttgtttgccaaaggcagagtggggctgagaaacaggctgcggtgattgcaattaccatccggtgttcgaggatcattggtgaagtcagcagatatttattgagttcctgtggtgtgcaaagcattatgataggcaccgtggggaaactggaaatgaatttgacatgaaaaggatgaacgattcactgattctctttgactcatttgagactaaaatgcagaattaccaacatttaaaacatatatatgcacatgtatttggtatgcatgtgtatctatataaaaatatataagagggactttatgggatagtatggactatggaaaaacaaatttgcacaatggcctgggaagttgaggtcactttttacagggaaatagaagaaactgagaacctagtctcgtatattctgagtaaatggaatcagtcctgggaatagagagtgtcctttgtgccagtattacaagaagcccaaactttatttttataaagggagaggatgactttctcaatcaagtgccaccagataaaaacaactgcagaggctggaactgccacaggctgtatgaaaggccactttggaaagggtttggatgagctggtggccttcaacctctgcctgcatctgccactttctgctaccctagggaggccaggaggagcttcggaggaccatcgccccactggtctagccatcatgacacctctggaggtgtcaagctcctgaaacaagctcatttcagtttctggcaaccccgtgtatttccgttttccccctaaagaacatatcataatcattgcacaaataaccatgttctttggtaatgaagccagaaaagaaagcgcaaaagaatggtgactcatttggactcttatctgtcttggaatgtcactgcttcattgccttctctgattgccttttgcatgtaaaactatgtgtctggagtcttttgccatctggatcttagtacctctttattatgtgcaatttattcctcaggtgtggaaatttctactgcaattgactacgtttgattattttgagcttgtgaaagatttctgaacagtgattgtcccgttaatagcccctcagaagatgttccctgctgataacagcatcctattttacttacttttatagcattactgtgcctagtcgtggggaaagagatggggctgtatagattatctgaatcatttgtctaagaggtacattcttccagatggaatcaataacttttttttttccaggttcccgtgcttgctatcacagtatcattgttaagtgacacttttgtctctcataacaccatcacactcttccttccaagtctgagctgtgctggggtttgaactaaaagccatatgtggaatattgacatgtgtaagaagcactttcagaatgttgtcctttttaagaaatgattctcaaaataccagtttttattccaaaaatttagagaacaaacccggaatatgaagtgcagattgtaacatggagctatttttttttcttaatcccataatacagctcctaaaagttgtgtgggatttgcgttgcataaatagccatgtgaattccacaagaagcaccagggaaagtttagagatttgcggcaatggaccgaagaacgggccaggaagtcctccaatttcctttggtctttccaggagattggactacacattgtaaagactgactgggtttcaactagtcaaaaagcactttcttctgttttcaatccctgttcgatttgtgcttctgtgcttgtaggagagatggccagggtggcagccctcatgcaggttgaagtatatgtagcctcagcctgatattcttggtgcgaaggtaaaaaaaaaaaaataaataaaaccattggcctggttgagggcgtgaccaccaagacatatatgttgtgcccgtgttcatcctgtgtatttatactgtatatgtagagtctagatttatatactgcaatgtaaaatatatatatatttaccttttttaaagacaatggaaattccaagtagctaaaacttagcttcatttatttaatgccactttaaatgtcttaaatttgtttcctggtggacagccgggtaatgcttttagctgctcgcatgcttgtctttctgcatctccatcatctgtttaccttttggttaaactaataaactagtttgggacttggctggcatgtgctgccagacccaaaggga

SEQ ID NO: 231 - protein, 768 aa, Homo Sapiens
MKLLWQAKMSSIQDWGEEVEEGAVYHVTLKRVQIQQAANKGARWLGVEGDQLPPGHTVSQYETCKIRTIKAGTLEKLVENLLTAFGDNDFTYISIFLSTYRGFASTKEVLELLLDRYGNLTSPNCEEDGSQSSSESKMVIRNAIASILRAWLDQCAEDFREPPHFPCLQKLLDYLTRMMPGSDPERRAQNLLEQFQKQEVETDNGLPNTISFSLEEEEELEGGESAEFTCFSEDLVAEQLTYMDAQLFKKVVPHHCLGCIWSRRDKKENKHLAPTIRATISQFNTLTKCVVSTILGGKELKTQQRAKIIEKWINIAHECRLLKNFSSLRAIVSALQSNSIYRLKKTWAAVPRDRMLMFEELSDIFSDHNNHLTSRELLMKEGTSKFANLDSSVKENQKRTQRRLQLQKDMGVMQGTVPYLGTFLTDLTMLDTALQDYIEGGLINFEKRRREFEVIAQIKLLQSACNSYCMTPDQKFIQWFQRQQLLTEEESYALSCEIEAAADASTTSPKPRKSMVKRLSLLFLGSDMITSPTPTKEQPKSTASGSSGESMDSVSVSSCESNHSEAEEGSITPMDTPDEPQKKLSESSSSCSSIHSMDTNSSGMSSLINPLSSPPSCNNNPKIHKRSVSVTSITSTVLPPVYNQQNEDTCIIRISVEDNNGNMYKSIMLTSQDKTPAVIQRAMLKHNLDSDPAEEYELVQVISEDKELVIPDSANVFYAMNSQVNFDFILRKKNSMEEQVKLRSRTSLTLPRTAKRGCWSNRHSKITL

SEQ ID NO: 232 - DNA, 754 bp, Homo Sapiens
atgggcagcagcggcaggtggccttggcttttgctgcagccgtcaacgacctatcatcggggtcctgcgtaaggtccggctggctgggacttggctgtgggtgggatggactggctgccggaccgagtgccctgcagttggtaggagtatgaggcagagtgatgcacacccgggcgcccagcatcgttctaattgccggagacattgcctcagactgtgcgctgctagaggctgcgttcctgagcaggaagcccgtttcctgggattggaactacccttcttggccagcgggaagtccccaaggacggagtcgaaaggtcaaatcttatctgtcagtgctgtgtgacagcatcgcaacgggatctgcagaacctgaactcgatccgtaatgcctcctgcctgcctctttcaagatggaggtgaaacctgtgggagaacctactcaagaggtgtctaaattcaaactttccaccaaggtagaaagcacgggacactggctggtggaagatcatgttcgaatatgggaagttttaaagacagaggaggttgaaggggaccagctgcctccaggacacacagtcagtcaatatgaaacctgtaagatcaggaccataaaagctggcaccttggagaagcttgtggagaacctgctgacagcttttggggacaatgactttacctatatcagcatctttctttcaacgtacagaggctttgcctccactaaagaagtgctggaactactgctggacag

SEQ ID NO: 233 - protein, 114 aa, Homo Sapiens
  VARIANT (1)...(114): Xaa = Any Amino Acid
MEVKPVGEPTQEVSKFKLSTKVESTGHWLVEDHVRIWEVLKTEEVEGDQLPPGHTVSQYETCKIRTIKAGTLEKLVENLLTAFGDNDFTYISIFLSTYRGFASTKEVLELLLDX

SEQ ID NO: 234 - DNA, 654 bp, Homo Sapiens
ggatggactggctgccggaccgagtgccctgcagttggtaggagtatgaggcagagtgatgcacacccgggcgcccagcatcgttctaattgccggagacattgcctcagactgtgcgctgctagaggctgcgttcctgagcaggaagcccgtttcctgggattggaactacccttcttggccagcgggaagtccccaaggacggagtcgaaaggtcaaatcttatctgtcagtgctgtgtgacagcatcgcaacgggatctgcagaacctgaactcgtgtgcagtttcctcaagggcagagattttgtccatcttgtccactactatatgccaagtgtttggaacagtttgcacggaggaatggttcctgaatgaattgaatgcatggatgaagtttcttcacctttggccaccttggatactgttttcttagcttggaatgtgttttcctcacttcattcaaaggaccagcttaaacatcacctcctcatagagacctacactgtgcctgtgtcttggtttagctcccttgcctacttttactttaagacacttatcacaatgatgatggtattatttatgtgatcatttatgtaatgactatctctgtcactagattaaagacctcatagggtcagggtctgtgactattt

SEQ ID NO: 235 - protein, 105 aa, Homo Sapiens
MHTRAPSIVLIAGDIASDCALLEAAFLSRKPVSWDWNYPSWPAGSPQGRSRKVKSYLSVLCDSIATGSAEPELVCSFLKGRDFVHLVHYYMPSVWNSLHGGMVPE

SEQ ID NO: 236 - DNA, 4954 bp, Homo Sapiens
atgggcagcagcggcaggtggccttggcttttgctgcagccgtcaacgacctatcatcggggtcctgcgtaaggtccggctggctgggacttggctgtgggtgggatggactggctgccggaccgagtgccctgcagttggtaggagtatgaggcagagtgatgcacacccgggcgcccagcatcgttctaattgccggagacattgcctcagactgtgcgctgctagaggctgcgttcctgagcaggaagcccgtttcctgggattggaactacccttcttggccagcgggaagtccccaaggacggagtcgaaaggtcaaatcttatctgtcagtgctgtgtgacagcatcgcaacgggatctgcagaacctgaactcgatccgtaatgcctcctgcctgcctctttcaagatggaggtgaaacctgtgggagaacctactcaagaggtgtctaaattcaaactttccaccaaggtagaaagcacgggacactggctggtggaagatcatgttcgaatatgggaagttttaaagacagaggaggttgaaggggaccagctgcctccaggacacacagtcagtcaatatgaaacctgtaagatcaggaccataaaagctggcaccttggagaagcttgtggagaacctgctgacagcttttggggacaatgactttacctatatcagcatctttctttcaacgtacagaggctttgcctccactaaagaagtgctggaactactgctggacaggtatggaaacctgacaagcccaaactgtgaagaagatggaagccaaagttcatcagagtccaaaatggtgatcaggaatgcaatcgcttccatactaagggcctggcttgaccagtgtgcagaagacttccgagagccccctcacttcccttgcttacagaaactgctggattatctcacacggatgatgccgggctctgacccagaaagaagagcacaaaatcttcttgagcagtttcagaagcaagaagtggaaactgacaatgggcttcccaacacgatctccttcagcctggaagaggaagaggaactggagggtggagagtcagcagaattcacgtgcttctcagaagatctcgtggcagagcagctgacctacatggatgcacaactcttcaagaaagtagtgcctcaccactgcctgggctgcatttggtctcgaagggataagaaggaaaacaaacatttggctcctacgatccgtgccaccatctctcagtttaataccctcaccaaatgtgttgtcagcaccatcctggggggcaaagaactcaaaactcagcagagagccaaaatcattgagaagtggatcaacatcgctcatgaatgtagactcctgaagaatttttcctccttgagggccatcgtttcggcactgcagtctaattccatctatcggttaaaaaagacttgggctgccgtcccaagggaccgaatgctgatgtttgaagaactttcagatatcttctcagaccataataaccatttgaccagccgagaactactgatgaaggaaggaacctcaaaatttgcaaacctggacagcagtgtgaaagaaaaccagaagcgtacccagaggcggctgcagctccagaaggacatgggtgtgatgcagggaactgtgccctacctgggcaccttcctgactgacctgaccatgcttgacactgcccttcaggactacatcgagggtggactgataaactttgagaaaaggagaagggaatttgaagtgattgcccagataaagctcttacagtctgcctgcaacagctattgcatgaccccagaccaaaagttcatccagtggttccagaggcagcagctcctgacagaggaggagagctatgccctgtcatgtgagattgaagcagctgctgacgccagcaccacctcgcccaagcctcggaagagcatggtgaagagactcagcctactgtttctagggtctgacatgatcaccagtcccactcccaccaaagagcagcccaagtccactgccagcgggagctctggtgaaagcatggactctgtcagcgtgtcatcctgcgagtcgaaccactcagaggctgaggagggctccattactcccatggacacccctgatgagcctcaaaaaaagctctctgagtcctcctcatcctgttcttctatccattccatggacacaaattcctcagggatgtcttccttaatcaaccccctctcctcccctccgtcctgcaacaacaaccccaaaatccacaagcgctctgtctcggtgacgtccattacctcgactgtgctgcctcctgtttacaaccaacagaatgaagacacctgcataatccgcatcagtgtggaagacaataacggcaacatgtacaagagcatcatgttgacgagccaggataaaacccccgctgtgatccagagagccatgctgaagcacaatctggactcagaccccgccgaggagtacgagctggtgcaggtcatctcggaggacaaagaacttgtgattccagactcagcaaatgtcttttatgccatgaacagccaagtgaactttgacttcattttgcgcaaaaagaactccatggaagaacaagtgaaactgcgtagccggaccagcttgacgttgcccaggacagctaaacggggctgctggagtaacagacacagcaaaatcaccctctgaagggagggaccagtggccccttgtttgccaaaggcagagtggggctgagaaacaggctgcggtgattgcaattaccatccggtgttcgaggatcattggtgaagtcagcagatatttattgagttcctgtggtgtgcaaagcattatgataggcaccgtggggaaactggaaatgaatttgacatgaaaaggatgaacgattcactgattctctttgactcatttgagactaaaatgcagaattaccaacatttaaaacatatatatgcacatgtatttggtatgcatgtgtatctatataaaaatatataagagggactttatgggatagtatggactatggaaaaacaaatttgcacaatggcctgggaagttgaggtcactttttacagggaaatagaagaaactgagaacctagtctcgtatattctgagtaaatggaatcagtcctgggaatagagagtgtcctttgtgccagtattacaagaagcccaaactttatttttataaagggagaggatgactttctcaatcaagtgccaccagataaaaacaactgcagaggctggaactgccacaggctgtatgaaaggccactttggaaagggtttggatgagctggtggccttcaacctctgcctgcatctgccactttctgctaccctagggaggccaggaggagcttcggaggaccatcgccccactggtctagccatcatgacacctctggaggtgtcaagctcctgaaacaagctcatttcagtttctggcaaccccgtgtatttccgttttccccctaaagaacatatcataatcattgcacaaataaccatgttctttggtaatgaagccagaaaagaaagcgcaaaagaatggtgactcatttggactcttatctgtcttggaatgtcactgcttcattgccttctctgattgccttttgcatgtaaaactatgtgtctggagtcttttgccatctggatcttagtacctctttattatgtgcaatttattcctcaggtgtggaaatttctactgcaattgactacgtttgattattttgagcttgtgaaagatttctgaacagtgattgtcccgttaatagcccctcagaagatgttccctgctgataacagcatcctattttacttacttttatagcattactgtgcctagtcgtggggaaagagatggggctgtatagattatctgaatcatttgtctaagaggtacattcttccagatggaatcaataacttttttttttccaggttcccgtgcttgctatcacagtatcattgttaagtgacacttttgtctctcataacaccatcacactcttccttccaagtctgagctgtgctggggtttgaactaaaagccatatgtggaatattgacatgtgtaagaagcactttcagaatgttgtcctttttaagaaatgattctcaaaataccagtttttattccaaaaatttagagaacaaacccggaatatgaagtgcagattgtaacatggagctatttttttttcttaatcccataatacagctcctaaaagttgtgtgggatttgcgttgcataaatagccatgtgaattccacaagaagcaccagggaaagtttagagatttgcggcaatggaccgaagaacgggccaggaagtcctccaatttcctttggtctttccaggagattggactacacattgtaaagactgactgggtttcaactagtcaaaaagcactttcttctgttttcaatccctgttcgatttgtgcttctgtgcttgtaggagagatggccagggtggcagccctcatgcaggttgaagtatatgtagcctcagcctgatattcttggtgcgaaggtaaaaaaaaaaaaataaataaaaccattggcctggttgagggcgtgaccaccaagacatatatgttgtgcccgtgttcatcctgtgtatttatactgtatatgtagagtctagatttatatactgcaatgtaaaatatatatatatttaccttttttaaagacaatggaaattccaagtagctaaaacttagcttcatttatttaatgccactttaaatgtcttaaatttgtttcctggtggacagccgggtaatgcttttagctgctcgcatgcttgtctttctgcatctccatcatctgtttaccttttggttaaactaataaactagtttgggacttggctggcatgtgctgccagacccaaaggga

SEQ ID NO: 237 - protein, 766 aa, Homo Sapiens
MEVKPVGEPTQEVSKFKLSTKVESTGHWLVEDHVRIWEVLKTEEVEGDQLPPGHTVSQYETCKIRTIKAGTLEKLVENLLTAFGDNDFTYISIFLSTYRGFASTKEVLELLLDRYGNLTSPNCEEDGSQSSSESKMVIRNAIASILRAWLDQCAEDFREPPHFPCLQKLLDYLTRMMPGSDPERRAQNLLEQFQKQEVETDNGLPNTISFSLEEEEELEGGESAEFTCFSEDLVAEQLTYMDAQLFKKVVPHHCLGCIWSRRDKKENKHLAPTIRATISQFNTLTKCVVSTILGGKELKTQQRAKIIEKWINIAHECRLLKNFSSLRAIVSALQSNSIYRLKKTWAAVPRDRMLMFEELSDIFSDHNNHLTSRELLMKEGTSKFANLDSSVKENQKRTQRRLQLQKDMGVMQGTVPYLGTFLTDLTMLDTALQDYIEGGLINFEKRRREFEVIAQIKLLQSACNSYCMTPDQKFIQWFQRQQLLTEEESYALSCEIEAAADASTTSPKPRKSMVKRLSLLFLGSDMITSPTPTKEQPKSTASGSSGESMDSVSVSSCESNHSEAEEGSITPMDTPDEPQKKLSESSSSCSSIHSMDTNSSGMSSLINPLSSPPSCNNNPKIHKRSVSVTSITSTVLPPVYNQQNEDTCIIRISVEDNNGNMYKSIMLTSQDKTPAVIQRAMLKHNLDSDPAEEYELVQVISEDKELVIPDSANVFYAMNSQVNFDFILRKKNSMEEQVKLRSRTSLTLPRTAKRGCWSNRHSKITL

SEQ ID NO: 238 - DNA, 721 bp, Mus Musculus
actgcatttactatcatttattttttattttttaaagattaatttatttaataaatgtgagtgcattctcgctgttgctgtctgcagacacaccagaagatgttatcagacgccgttacagatggttgtgagccaccatgtggttgctgggatttgcactcatgatgtctggaactgcagtccgtgctcttaatcgctgagccatctccccaggccccaatatattttattgtttttattttatgcacattggtatgggtttcgtcttcacatacgtctggggttaggctgtcagatcttagagttttagacaattgttaacacacacttgtaacagatattgaaatatgcggtaattgaagataaatcttcaaatgaaaagatgcagatattgaaatatgcggtaattgaagataaatcttcaaatgaaaagatgcagatattgaaatatgcggtaattgaagataaatcttcaaatgaaaagatgcagatattgaaatatgcggtaattgaagataaatcttcaaatgaaaagatgaaagaaatccataagtattcttcccaaatgatcattgtaaaacacagaaaaatgccaggaagctgcactataaggacactatatagaaacatcttgtaaatgccagaggcacttgttgcgctcacctcgtccagcaagaaaaacgcaacacggtccgattcttctcaacagccttctttatct

SEQ ID NO: 239 - DNA, 669 bp, Mus Musculus
actgcatttactatcatttattttttattttttaaagattaatttatttaataaatgtgagtgcattctcgctgttgctgtctgcagacacaccagaagatgttatcagacgccgttacagatggttgtgagccaccatgtggttgctgggatttgcactcatgatgtctggaactgcagtccgtgctcttaatcgctgagccatctccccaggccccaatatattttattgtttttattttatgcacattggtatgggtttcgtcttcacatacgtctggggttaggctgtcagatcttagagttttagacaattgttaacacacacttatgcagatattgaaatatgcggtaattgaagataaatcttcaaatgaaaagatgcagatattgaaatatgcggtaattgaagataaatcttcaaatgaaaagatgcagatattgaaatatgcggtaattgaagataaatcttcaaatgaaaagatgaaagaaatccataagtattcttcccaaatgatcattgtaaaacacagaaaaatgccaggaagctgcactataaggacactatatagaaacatcttgtaaatgccagaggcacttgttgcgctcacctcgtccagcaagaaaaacgcaacacggtccgattcttctcaacagccttctttatct

SEQ ID NO: 240 - protein, 84 aa, Mus Musculus
MQILKYAVIEDKSSNEKMQILKYAVIEDKSSNEKMQILKYAVIEDKSSNEKMKEIHKYSSQMIIVKHRKMPGSCTIRTLYRNIL

SEQ ID NO: 241 - DNA, 34182 bp, Mus Musculus
  misc_feature (1)...(34182): n = A,T,C or G
acactgcaggtaccaaccaaaaagctgaagaaatatgaaaaagaatatcaggcgatgcgggagaatcagctgcagcaggaggacccaatggatagatacaaggtatggggtacaaaggacttcacttatcctagataagcagttgtggtgagttcagctgcttctgttcaactctgaaccactcagacatggacaagctgactatgtgtgtgtgtcttcgttttcaactgagacagtcaaaagtcaagtattcaactataacatttcttttctttcagtttgtatatttataggtaactccagctgttgaatttatactgggaatcttcatgagaagctgaaagaaagggaaaaagaaagtggctttctgctttcaaaattgaggaaaataaaccagaaaatgccaaaagtactgttttagcagtgcacgttcacttccacagagacttttaggtgggactgttccaagacactctcgaggatattgcaaacttgtccctgactatagcacatgttaaaaatacaaatttagaagaaaaaataaaaaccaaatggtgtatcaagcacagtaatgtgatttccacaaacaaatcataggtaatagtgatatttgcatgcagtttgagaatcaaaattatctcattcatagcttcattagttcaggtctatacatttatattgcgtaaatggtcatgtcaagcccagattgccatgtggcaatgcgatgggataggaggatcattcatgtccaggagtttaaaaccaggagcatagtgagaccccatctaaaaacacaacataaaacgacgacaaatgtctcatggagcccaaagaagctgtactacaactgaactgtaactgccttgcaccctttttctgttaaagcaggcatgtataaacacttataaacaataacattatttgtaaagtttccactgagataaaattaaacttttaaaaatcggtgttttaagttctagtattgtagggtatggctctttgtttggtgtggggtttcactttgacagggtcttgctctgtattccaggctgatctttatccagacctgtgccaccatccccatgctgtggtaacttttatctgcacatgtcacatgccctttatcgctatttttgtattattatagttttctaatatattctgtaattaatatttctgtaactgttttataatgtgtaggttccagcgatctacttggcaaactcacagtcttcaagttataattacatttcagggtaataattgccaacataattcaggccatgagcagattttttgatcctttagatataggaaaatctggtgtaagaagtaatgaaggtctggagagatggctctgtctggtgaaggcacacgtttccaagctgatgacctgacttccatttcctggacccacaagtggaaggagaaagccctgacctttatactcacactgtggcatatgtgtgcccacatataacacacaaagacatgccagctggctgtggtggcacatgtctttaatctcagcactccagaggcagaggcaggtggatctgagttcagggccagcctggtcttcagagtgagttccagaacagctaaggctactcagagaaagaagatcttgaagacactgaaagctcacacctgttcagtaacaattccttctttaccattggaacccatattgcataaatggtcatgtcaagcccagattgccatgtggcaagagtgttgggaagactgtgagtatttaaaaacaaaaacaaaacccagaaatgtcatacaataagctgtttcaatttggtgctattatttctcccacatctgatgatattgaagaagggaaattgcagaaaagtacagattggcatggaagagctaagagtgcataggttactctgctctcaacacatgtgctttttgctggataaatctaaacaagggcctaggggtatacctcaggcattgcctagtatgtatgggatcataggttcagtgcacaggagcttgcaacttcatgcctcccatctgaccatgctctctgtgcccattgcattgtcatttgatattgctggactcacttacatgcaacacttcagtttcaaaccaggaataaagagaagaaatggtgttggtataaatttgttttaaaattctacgcatggtgaaatgttcagcaattgggtagtggtgatgtctatacagtttcatgtaactgaattgaatactaaagtatgatttttgtcagacatggtgataaatgtaatgctagcacacaagaggctaagggagaagggtgaagtgtttgaagccagcttgagctacatattgagaccatgactcagcaatccctctttaaaaatcacatgatttaatagcatgtaagttacatcgaaacaagacaaatgttcaagaatattggccaccctctttctcttctttctctgtctgtctgtctgtctgtctgactgtctgtctgactgactgtctctctccctcttttagttttgtttgtgtgtgtgcttgtgtgtgtgcacacacatgtatatgcagatgcatgcacaagtgtatgcaaatgggcatggaggcacaaatgtcaatgtctggtatcttcctcagttactctctacctcagctttggaggtagaactcagttttggaggtcactaatttcgctcacccatagctgctctgttgctgtttgttgtttgcttcctcttaatgtaggtgccagagacttaaactcaggccttgaggtttgcatggcaagcactctaccagcggagccatttctccagccctactctttctctgtgagacagtgtctcccatgtcataggctgggcttgaactcactgtgtagctgaagattattatgtcagacatctgaacctcttgcctctacttacctgagtgctgagactacaagaataaaccaccatgcccagtttatatgatgctgggaactgaacttannnnnnnnnnnnnnnnnnnnctaatccagcatcaaatttgtactgagaatgcagagaaccctcaaaaaactgctttacagcctttagtggagtctctttctgcttaattccagaagattccaaaagagaaaaaggaaacttttcaggaaatgagtattcagtattattttaaaaccttttttatcttcctccttaacctgatcaaatgtatgcaatattggttttttatctgatttttggtttgtaaatttgattgagttcaaatggggtgaaatatgagctatagatgtggctaatgatgtcccccaaatatacatttgtgaataggtatatctatgttatatcacttcacttatcagtgagcaaacccaccaaagcatataagaatgttagggaccagtatccttctcatacactgagtacatgggtcactttcaatgtgcggaagagcttcagtggtctggccagctgctgaggcttctagagaagtgcagccttttacagaaggatgcactgtttctcttgtttaattaagacatgctgatgctaatgcaggtcaggccttcgaaaacacaagtaattaattaaatgcagtgaatttcccaaagcagagtaaaagctacctgttctgtagggaaagatcctgggaagagcgtggaatgcttaaactctgttgggcttaagatatgtatagtatcataaatatgtaatttagagcttagctatctagccattgtcaatatggttaaatgtagaatatttaactgcctttgtgagcttaattaggtatagtaaattttttaaagccaaaacataagtctaatcagtaagtcagtggtgaaaggcttgcctagcaggaagcccctgggtttggtccccagaaccacagaaccaatccaaatctgaacagaatataattcagatagaaatgattcttctgggctggagagatagctcagaggttaagcacactgcttgcttttccagtggtcttgagttaaattcccagcaaccccatggtggctcatgactatctataatgagctctggctccctcttctggcctgcaggtatacatgcaggtagaacactatacataaataagtaaatgtttaaaaaaacaaaaacaaacaaacaaaaccctagggacccagtatttctaaatgacgtgactttacggggggggggggggggaagaagtgattcttctaatgagttctgtaaatcatactaagtttttctttcttacctgagaaagagaaggaggtagctctcatgttgttttttacattagtgtgttaggctttccttactaatggatgtcaaaagacataaatttactgtggaaaaaatgttgttcttccattgaaaagtatcattatctgtgctatttcttccttaccatagagactggtattggctttgggaatacctatcctgtcaactaaggtgctaatgagaaataacagacatgaagatggtttctgtttgtctgcgataaacagaatttccttatcatgatgttaaatggcagaaggtcccgaattcttcccagcctggaaacacttccctgttgctgtacctgctgaaaagtgtggctaaggagtctgcccgtgactcagttacttcacgcgtacagctcctgaaagtgcgaacacaagggaattttttagtctgtttatccttgatttcccccatcttccaatgtttttcttaggaactttttattcctgttattgttgagaaaaaaagtatgacgataatgtttctatatcatctgtaactgattactctttgttttttttttattttatttttgaagatatggtctcgcattaacacagggtgacctgaaaatctatgcactagaatagaaagccacagtagtttgtggaccaaatctggatgattggtgtattgtgtttttgtttgctcatgactgcttctgcacagtgactgtcatgtcagcatggaaacgtggtctgtggtgctgaaatgtttcatctcctttgctaaaatatcacctaaggttgctggagttttgtttttagtatataaagaaatgcagtgtgttttgctacctgtagttattttgtttttcgtttgatactttaaatgtctaaatttccataagaaagatgaattgaatgttatgtgaaaggaagaaagcatccattggggtccaatatccagaagtttctctcaactcttcatttataggtgaaatcaatatctaagcacttcatctgtagccatttatctttgtagatcaaaaaactgtcttctgaaaatctgaggatgatgatcaactctttttaaaagaagcatccaaaagacagtgtggaaaagttggtgttttgttgcttataaaattgtgttgggtctctgagagaaatgttttctcctgacccttaaatatttttatatgtgccaagaactcaccatagcagcaggaaacacacccaagactgtgtgtgaggtttatggagccactgcctctgcgtcactttttccctgaaagctgagttcattttcttctccttgccagttagcatgtctctggtttctccttgacatcctttagatggcttcaccaaaacttcagcctccagaaacaaacaggaactaggcatagttttctatttgctttccctgtttagcaatttcagaaaccagctattctgaaaggcttctgatactgtcctatgaggaaccccctgcccccagcattaacacaaaatcaacaagtcatctgtagttgctaatgtttccacacacggcattttcattttcataagtcatgcaaactgcaaatagcagtgtgggaagggaggagttttcaagcctgagtcttctgcgttgagacttgcccacttgcctcaagtatactcttccattgaatgtttgcagtcacggagagaacttcactgagtgacattctggacaaacagcgaagtattaacaagtgtctgtttctgttgctgctgtttcctaaatgtattagtaggtgtgaaatttcactggatattccttttttatttttttcaattgtctttgtacctatggttgaaaacagtagttggtctttgacctttgaggaggtaagttgattttctttgatctgtgtatgtctgtattcatgtctgtctctgaaaaaaaaaaatgcagtattatcctcctaatagtaaccagacttccccagctatgcaagtcctgtgcaagaagggagggaggggctgaggaaagttgtgtgcttttgttcaaatggtatcagctgtgagagatggtgtgggtttcagaagtgtgatgtgaggttatgtaacctgtgcctcccggaatcctttctgatagctaagaggagctatctgcctgatttgtttccaggctctgggatgttggcacttctgccttcactaacatccaccgtgtgggatctccactggctaaagtcatccagctgacttcactgtctctcccttaggcagagcagaagcttggtttgaaacgaggcaagcctatcaaacctaactctgtcccccgtgtaaagtgaaggaaaacttttttttttttaatcaaagtggttagttctgaaaatagttttggctcctcagggaagcctggaaaagacacctaagcatggtaatgtgttttaatccttgaacaagttcatcacaggagatctcagcctcagcaacagaggctcacaagatacctcattgcccaggattgcccactggaggatgatactgcatttttgaccccatagcttgctttcccccatctgtgagtgcagagcagacatctgacacttcccactgcttgctttgcagacaccaaactggagctgcttgctcaagcaaaagccagtaggcatgcctcgtgggtcagtctgctcgttagggactctcagatacttaggtcttcacagagccctcctagttcttacccctttagctgtgcatctgtgatgaagggtgagaagtctcctattagaatttcagctgtgctcactctcagtttgctctgtaacacataatccatccgacctgtgcttctaatctagagtgaagttgctccctggtaatccttctaaatacttgaatgagtaactttcccatggacatcatatgactaccttcgggttaactcagttctacacacagcaggaacctgaaaaactggtagcgttttaatatggtgtaaataatagttgaggaagcattttgtagctttgaattctgtgagcacagactcagtagaagcagcaacccaggaaccaggtggcagaggagccttgtcttagcctctcacacggatttatcaagaaatgagaagaatctcttccccacccaagcagtctgccttgtgaagtatgtggtgttgagattgtgctggcttactgttgtttcctggcaaggagaccattgatgggagaggtttctgaaatgtgtgttttaaagagtcttaagttttctgctgcaagcgcatgagttgtttctatggagaagtaatagatgtctcacaaatacaaactctccagcccctggtagaaattgggctttgtcagtgaaggctcagcctcaggaggctttctttttctttttctttttctttttctttttctttttctttttctttttctttttctttttctttttctttttctttttctttttctttttccttttctttttccttttctttttccttttctttttccttttctttttccttttctttttctttttccttttctttttctttttccttttctttttctttctttcttatttttttttttgatgttgttgttttttcggttttttggtttctttgatacagagtttctccgtattgctctggctgtcctgtaactcactctttagaccaggctggcctcgaactcagaaatccacctgcctctgcctcccaagtgctgggattaaaggcctgtgccaccacctcccggcaggaggctttgtttctatatattacccatgaacttcagtgggaggttagagctgggggaaactatgtcctagacttttaacaaatacaagttgccctaccaatccagggagcactgtcttttcaggaacacataggacaaagaagattttctcaggtgcaatgatgtgcgttggtcactagaaaaggcccagtgtgttttgtgtagaaaataaccttgtttaatagtagacttagatcttttttctttctttccttcttacttactttctttttcacttctacacattttagtgtttcatcccttctagtagaatcgaaattctgaattgaaggggtttaacaaaagtttttttaaaaaaattctgttgtaactgtattatattccttgtggaaaacctgagaacatttcaagaagagaaaggtaatgtcaaatcaaacccactgcctacagctaatatctgttgttcatattgttataaaaatgggattttctagctattattaaattttttctctaatatgtattaatatatggaatcctatcatggattttcttaaaagtatttggaattgtaacttttgtgtattagtagggtctgttttcaagaagctttttttatatccctcaactgtctcagtctattttcagggtgtagacttccctttaccttctctgctgatcttccctgcttatgagtccttggcttccatggagcctcagactttgctcttagatctgttttatagactttctgcagaaatggagatgacattgggatcttagagatttctttccctatgaaactaacaccaggctgttctacagcagataatccccacctctcgtatgcactgacacaccatcttccagaacatgtatttgtcttgtgtgtttttgccagtgttttgcctgggtttgccacccttttagaaaatactgtcaggagtgtagatctaaaacaaaatagagcttgttacactgaaattcatcctatcagcccccttttgggtctcctgcaatcaacagtagcaaagaaaacatatctggtagtgtgcaatagaaagcactaaaccactgctctttggaagtgggcacacacactcagttcacaatggctggtaaagagtgcctggattcattcatcttaacttttaaactgttcttgagagttcagagcatttggggggggggtggggaccactgctgtattttacccagaatcttttaatctgaagtttgaataaaacagaataaacatttagaacatacatttcagggcccattgctctcagtcacacaaaaacatatttacagaagtaaatatatcttaaagaataagacaatcagctggttgcagaatcaccaattcacatgtcttctttctttcttctttttgaaccctatataatttgattttaggtttagtgtttttaaacagcttcaattaatttggtccctcatcttggagaagcaatttcagaaaaaaattaccagcatcctccctgctgtgtcttgtagactgtttctctagaggtccaactgtgcatgtttcaaaaaagaattgttggcatctgtgttctaggtctatgtgaaaacctcctgtaactgggagcacatctggaaattctgctctttgtggcgcgtcttacctaacaaagttctgtctggagggtctaggggatgtttgttaagcttcactggcagagaactgcatctgcaccgctggctaaactcactgttgtttcccagacagcagctgcttcctgtgccactgtgcccgcccttctacacctctgagagttcacttgttgtcgcttgtttctcccctgccactttctactcctacctgcgggctaatgtggacttctggctctcgctctttttcttcagagggagaaccgaagattacaggaggccagcatgaggttggaacaagaaaatgatgaccttgcccatgaactagtgacaagcaaaattgctctgcggaatgacttggatcaggtgagtttgtccttcactgtatagaaatgatgctgcaacagctccttcgggggtgagggccacggtgctagctctgttcatttctcttggtttatttgttctattttttgttgttgttgttgttgtttgtttgttttttgtttttgttttgttttgagctgagttctcactatgtagttctggctgtcctggaactcactatgtagaccaggctgtcctagaagtcccagagatctacccgcctcttcctcccaaatgctggagttgaaggcataccctacttcccctgtgccttctcacacagtgagctgctgtatagatactgggtgggtggcaggtggaaggggacagcttgtgctaattacagagtggaaaatgcaagtctcgagaaaggtttggcttggttccaaacaacttgtgtgacatacttttttaaatcctttatcagtaattttcctacaccaagagctgccagaataattacctaaaaatattagtcagcaagagcatactaatgccacgttgacatttggaggcacctctctgttacagccataattctcgtctgtgacatgtagaactgtgtataaagagcatagatcaagtgtaggaccaggtatgtaggtatatagctttaatcctagcaattaagaggctgagtgaggaagattgggagttcagcctcatagttaccctgagccacctaagagcctgtctcattaaacaaaacaaggaagacaacagaaggcactgttgaacagtgccctggttcgagtcttgactgttctaccctgggcagctctttatcagtctgtaggtataaaacctgtctacctcctggagaagatgtaggaattcagaaagcccttcggttctgtgccagctagttttggatcaatttgacacaagccggaatcatttaggaggaggggacctaagtcaagaaaatgcctagcacagattgactggggtcaagcgtatttcacattttcttgatgggtgtgtgtgtggggtgcaggggagggtatggctcattgtggatggtaccacccttgggcaggtagtcctgagttgtataaagaaagcaggcttagcaagtcaggatatagaagcccttccctaatagctcctggcctgactttcctcagtgatggatggctacctgaaagtgtaagctgaagtgaaccccttcttccctaagcttcagttggtcactgtgtttttatcacagctcgaataacctaagacaagtagtgtgtattcattacctggtaactgtctccaggaaaccttctgcttggttggcttccctggttcctcacagcagtgctgacagtctctggacttcctgttttcttctgcaagcattttcagagatgagtactaggatggaagcggtcatgtacactttgaaatctcctctgcagtctgcttcctaaagtgaaaatgttcataatagataggcccaggtcagaaaaccctagatgagtctcagacagtaaatcattgatgcctgtgggctgactgaatttttataggatttaaatacaaattcattgataatgtcatcagcttaaaattgaaggatggcttaaaatggtctctgctatgactttttagtttcccaatttaaacaactaattatgtgactcagagcttttaatttcattttaatgtgtttttaagattgtgcctggtatttgaggaggccaaaggagggagtcggatcccctgaaactatagttagggacctttgtgagcggccatgtgggtgctgggaacgaatgtggatcctctgcaaaagcagcatgacttcccaatacagatctcccggccccaactcaaaggtttttaaatgggagataagacctaaatactatggagaataataataatagggcaggatgaagctgtgggaaccagcactaaatcagattttttttcttctgccaagggctagagattgaactccagaactcaggccgtgctaggcaattactttaccacagaaccacatccccaacccctaaattgactttgaaaatgaagacaaacaaacaaaaccaaatcaggctgcttggagcagagggaatagaaggtagaaaaagaaacccatttagtccctttcagctatagattccattcatcctggtccagtggaagttgatagaagtcataaatgaagcatgtggcaaagatcaggagctgcggaagtccccattcagtcagggcgagttcagcctggtctcagggaagcagggcgacatggaaagtctgggtcatttgttccctattaattgtcttaagatgatgagctaagaagaaagtgaacattatgtggtcatttgtattaagcctagagaatgtttaagcaaataggtttttagtgattactctctgtacgctaagtaagcagtatgcataatgacttacacatattatcttctttagtattattgataatcccgtgaagcaaatgcttcttgatgtatccagtagtagggacattcatttcaaacctctgagatttcaccatgcctgagcactcactgtaaaagcgaaagctgtcttgcctactagtctctgtagcaagggtaatcagacatccgcacaagtgagtctctgtttctgaaacaaagatcaccagtttagtaataacaagaatgtacaagtcagctctgccctaactaaacaaatggctagcaagacctttcctctgtccctcagtctgctagagcctttcttgagctccatttggcatcttttctttctctgcctggccatgaacctctctgtattttgcctcctatgtctgtgtatgcttacagtggctgccattgctttttcagagatagaatagagaacagtcaggaacctcagtgcatgaactaaaccttcaggacaccaggagccactgattgcctaaaggggcctcagttgataaaaaagagttcagccttcagtctgactctgaggccgttagttcagactgttcaccagcttccctgatgtggaaagctgcctttttctcgctctgctacagcttgctgtgagggtgcctccttcccaattctccagtctctttgttggtgttttattttattttatttttttaatgaattttagtacaaagtaagttcactattttcccctcaaaaacagacatcattccaaaattttatttttattttatttcttgagataatgtttcctcatggagccttggctgtcactttgtagctcaggctggcctcgaactcagagatcctcctgcctctgcctcccaggtttaactaggtgtgccgccatgcccacccagccttgttggggttgtaactgcacactcttcaccctgggcctcagtctttttaaagtgttctcactcactggacccactggggtgagacttcaagttttgtctttgtgtctggaaaccccatacatacctttaatcttgtacagtggttatttctgcttgtcgcaaattcaacttttgaggcaaggattattttagagccctcatttcagaagggagaaaactgctatactccaatgtggaaatttattctttagaagcaaagatcttatttgaaaatgaacatgaaagtttgtttactacatgctacttgtaagaaataagatatagaaatgatgtaatgcccagcattagaggagagtaattagttgctgcagaatatttggtcacattgtgaaccccaagtttgtgaactggaaagccttgttatgctgagactcagccctagcacacaccttttccccaggagctttcaggtccttgtgagcaggttgctgtggtgaggcttggtcccagcacacacctttaaccaagagcttactgtaaccaagagctaagtaaagtcaacgctaggtcaagaggcagagcaagcaaccatttgaaagggagtggccttaagaaaacctaggagagagaaaggagggtctttcagttgaagggtatttaaggcagcagggagagagagaaggggctttttccttctgggacgtttgtggagtaggaaggtcagctgggtgctttctctacctctctgagctagcaggctttcagcccagcatctggctcctgagtcttcattagtaaaatcgaatggctgggatgtttgtttttaaaacaacagataatacttctgtaaaatatgtctttagaataattttatagataacgaggctagaaaaacaatatgcattctatataagaacacatgactttattaacaaatgaatattacttcaaaaatcatcttacctgcaaagaatcccttttgtggattagtctgaaatgtttgctattatgagttttccagaaagaaactggttattgagaacctctgtacttaatgtagatactatatccattcttttagaaaggattctaggggccagagaggtggctcagtatttatagtttgctatgcaagcctgagaacctgagttcgaatccccagtataaattgcaaaagccaaggatgatagtctgtgtctgaacccagcactgggggaaaggagacaggcaggtcagtggaatttctcaggcattcttcctagccaaattggtgagctctaaggaagacacaaggcattaactaacctttggcctacatacacacacacacacacacacacatacacacacagccctttatttatttacttcctgtttgctatctctatacctccctctgccttttaaaaaatgatattctagaacctttatttcatcgctaattatatagaaaaaaataataaagctgttaatttcatgcatacctcctaacttctgatttcccagtttctgcctctacaggaggtttttttcttgtcatacagcctttggcttgttggtcttcaaggaagtgcatcacttgggagttaacagactggctttgtctgctcctcctgtttgcccaggacctttgctttcagtatatgatatcctttaatcaaagcagcaagcattaacaaacacttacacttggttgtatgtggggctgtgtgtaaagtaagcccgaggagatactttgtcagaataagtgatctcttgtctttgttgctgtagtgcaggcatcctgaatgccctgtgcagcaaaggcacttcagcttttatcttggagagaggactctttttatgactcacccttagactcttgattagagaatgatccttagcaatcagaaatgatcaaagaaacatcttcatttcagtgtttctgggccctccccatccttccctgatctcaaggaacaagaaagaaaagataaaattagtattttcccatggaggctatgtttgagttcttcctgactatagcccagaagctgcagatctgagaggtacattgttttgttttgttctaagtcaaacaattggctgaatggattctatcagtaaagatcctcattcctgttcacccaagcctttgatcgggttacaggtagatctgtgattaagcaggtattgtagtccctatttctgccttgtatttatgtcacagaagccaactgtgatctgaacttcaaatagcagtaagcattatggctgaagacttgatgttctgttcagactatcagattatgatgaaggctttatgatttgggttcaaaggtggaatttaagtaaacctgtttaatattatgcttgttgggcattatacacaatgccagcttgaacaaaatatagaactgttggctatacaaaaatccagaaacatctcttgtttgtttgtttgtttgtttgtttgtttgtttgtttttccagacagagtttctctgtgtagctctggctttcctagaactcactctgtagaccagactggccttgaactctgcctgcctccacactacacctcccccccatccccagcactaggtttaaaggcatgcaccactgcctcccagcgcagaaacctattttcacaggaggcagggcattcgagacctggtcctattttgttggacaggagaatggcttctgcgtcactgttgaacataaagagactcttggaataaagtctcttagaaaactgtgaaactctttacatgaagggcttacaagctctgttatgttggacacttatcaataaatttagcctcacagctgggcatggtggcgcacacctttgatcccagcacttgggaggcagaggcaggcggatttctgagttcgaggccagcctggtctacagagtcccaggacggccagggctatacagagaaaccctgtctcgaaaaaacaaaaacaaaaacaaaaaaacccaacccttctctcccccccccccaaaaaaaaagatagggtcttcggcatagctatagcttccaaaaccagaaaatggctggatattctaccagattcaatcatgaagcttctcactaaagtctgcatagcagtagcattgtattcatagaataatattcatgttgactaaaggctaagttatgtctcttgaagacattagatctttagaacatttatttcagagtttatactgtgtgtattgggattattctcttttaaattgtaaaaattgctggacggtgacaagaagctgttgctatcattttttttattggcagaactcagtattcttaggtggagctggagccagtgggaggcatatttgattagtgtttaagaacttgagcatagttggttcttctgatacactgtgctgtgcccacgcatcagggactttgaggagggtctcttgcttggtgagtcacctcagtcatctggatagcagcccttaggatttagtattgagctcccgagttctctgagattctcacagttcaagactacttgactaatagtttttgcaaattggattttggggtccacctctaattttagtaagcccctctgctcttctgatccttcccctaatgtttaaaatcttctttatatttattcgttggtttatgttgcttatgagagtgtgcatgtttcacagcatgcatgtggaggtgagttctctctgtttgccatgtgggttctcagactggaacttgagttgtcaggcttggtggccagtgtctttacctactaagccagtcattgctgccctcccacctaaaactgaatgtatcagaatgaaatgtagagtttgctctgctgcttccacctgctgagtgctggcattgctggcatgctgccccgtttatatggtggtagattgaattgaaggccttgcagatacacgcactgtttagtgagccccaccaccactcccacccctgctgccctgagtcttgaagatgcctaaggaacttttttaccttaagtatccaatagtcctgactactctagagacagttcttgccactaaaacagagggcagcagaatctggaaggcagtaagaatgagaaactgggatgcaattccctgccagttcccagcagactgtgctggcccggccatctagacacgtggggaagatggtaaaacacaaacagaagctggctggctaacatgcatgataacttggatagtgtttggctactttcaggtaaggatggtttcttcaagtagctgtctctcctctgcctcagggtcttctgtgctaagcccaccctgagtccctctgccactgcaagcagtctgcttcctcagtaccttagaaaggcacatccatccatccatccattcactaaccacttaagagatacacctgtccccagggtggctgtggtgtcagggacacagttaaaagcaaaagaaatatgatttctcatggtgtttaaagcatagtggcaagacatataagtcccacacacaacgcaacacagtgcctggagtgtaatggagggacaaacagcagagcagtttgaatggagtgaggctggcttgttcactgggatgtgaatgtcaggctggaaccagagagttcggctaggacctcagagtacagaagagacaaggctactacattaagtatacacaggggaactttagttaattttggttctgtctccaagttaacaagaaggcattctctttgagcttctcctgtatcttctagaagcacagtattggctgcttggctttctgctacagagttcagcttttcttagcctctcatgtagattcttttctttttttttttttaagatttatttatttattttatgtgagtacattgtagctgttttcagacataccagaagagggcattggatcccattacagatggttatgagccaccatgtggttgctggttattgaactcaggacctctgaaagagcaatcttaaccgctgaaccacctctccagccctttcttgtagattctttgtcttaatttcttcttactctgttaacatatgagtgtccttgtgggccagtgtaccccagctggttttcaaaatttgctgcctaaatattgtcctgtctgggttttccccatgtgtttctaacctgaggcttctgttagaggacagttctctctactcaacagttccatctattcagagtatgtcttgggacatgtaaaaaaatgtgccagaagtgtttagaaagaacacagacttgaatatgggtcaaatccaaaccatgcttgttatgtgagatatttagccccagatccctccaaacctcagtgttattagatataagttattgttctgtaaagattaaggctaatgtgaatcaaatggctgcataaaattggctgcagaaaaaaaaagccaccttgaagatgagctggaggagaatagggtggcctgaagtcattatttgtgaggctgggaaaacgagcacgtggattccatcctgtccttacagctgccatggtttcatcattgcaggcagaagacaaggctgatgtgctgaataaggagctcctctttaccaagcagaggttggtggagactgaggaagagaagaggaagcaagaggaggagaccgcccaggtaaggcccaggcaggcttttctctgtgtagataaactggcaggaagttggttaatattgtgagtgagtgaatgaatgagagagagagagagagagagagaaatgatcccccaccccccaaatcaaggggaatgttaagcagtaattctggtttttgaacatcttgtaggagtttgccttcatggaaatgtctagcaggaatgttgagctttttctagatttagtgacttcgaattgtgatccaagagccttgatgaatctggaaattttctgccacatctgtgagatcatgatgtcttttgaagctgcaatgaatgctgtggaactggaggcttacagtgatctctgtctgacactgacaggagctgtggcctccatctgtagcttccttcagttttctgagtcacgctgcagtgttggagatgacatctcctgcttagcccataactgacttccagagggagaagtcctctgaaatcatgagtgagtttcctcctgaggaaaattcagtaatgctaaatataaactgaatttattctcaagaatttcaaacaccttcttccaaacagcccgagaaaagtgtcagtgaagtcacacgtggagaggtgtgtcattagcaccttccaaggcctacaaagaaaagttctgtgattgttttccattgaaatatgttaaaaagatgattctttatgtcagcatctcaaattatgaataggaagaattcatctttttgtttttttaaagaagattgttttacctttatgtgtatgtgtgtttgtttgtgggtgtatgtcacgtatatgtgtgtactcacagaggccagaggagggtgttgggtcccctagagctggagttacagacagttgtgagcctcccaacctgagtgctaggaactaaactcaggttctctacaggaacattatgcttttaaccgctgagccgtctcttcagccctagtaattcatctttttattctgtgtgtgttgaaagactaaccagagctgggttgtttgcttacattcctgtgtggccatcaacctaacagaaccccagtacccacacctttcatcacctaaccttcctctaacctaggattctatagctgctggcaaaacaacaacgtggctgcaaatagaatatttgtagttgagcatttcacccatggaaacaaataccctgtgctgtgtcactctttcccttttgtctggctctttgaacctccagtctgtggaagatctcttaccttccattccttcctaacctaaagcctcttacccctgcaatagcggcagccatgggactgtagacacgaagaccaaagtatagcattaacagtagcacacttaaaacacaatatcaccctagcactttgttgtagacttacaatgatgccagcttctgaactgacactcagcagtacaattatcaagcacttggaaagcagaagcacatttattatagggccccttgtatgtcctccactttatagaaaagaaagccttcttcatctccgtaagtggtaggctttaaactatgaagatcaagaaaacttgaatatagatatttatggacattgattaacattttgattgaaggtctagagacatggctcagcagataagagcacttgctgctcttacagaggaccagagttcccagcatccaaagggagatttacaaccagctgcaactcttaagtctagggactccaacaccctctcctgacctttgctggcacacatgcatacgtacccacatacacaaatttaaaaatcataaaaaaaataccaagtttgactggccttattttttttttaagctaaaagaagtcttcaggaaacagttagaaaaggcagaatatgagataaagaagacaacagctatcattgctgagtataaacaggtaatgtgacactgtgggcttttaatttttttctataaaagcaattacttttacttatggtattttgtttgtttgtgttttcagagatgatttctagatttatgaagaacagcgtcttacttattctctactctggaataggcagataacttgtcacttagttgaccagtacacactgttggggtattttagtgttgtgcagctcctatgggattggaaacagtcccattgagactcttttctagtaggtcactctgctaacatttgcctcttttcagagcctagaaacgatattgaatgggcagtggctaggggagaatgttttgatcagctctcatggtcccccaaggctggttatgtagacttgcccactgcaaaccagtactggccaaaaattgtctgtggattttttttttttttttttttttggtttttcgagacagggtttctctgtgtagccctggctgtcctggaactcactctgtagaccaggctggcctcaaacacagaaatccgcctgcctctgccacccgagtgctgggattaaaggcgtgcgccaccacgcctggctgtctgtggactttagaatgcttctttactagagagctgtctgcacctgaaggtgttcctagctccatcagcagggtggtcctagaaagccttcactccaggtcctgctctgtcctctgtcttcgtgtccttcttgttggtagctggagatggcaaggacccctcatcctaagaagactctgagtggaatacttatttatgttctaggctttcagaattgacagtgctatgtgctattttctgatcagagagtttccttggaacatcaacatcagcgtagaaaggacattggcatctcacatgtgcatgttttataaagtgtttttatgcatacaagtgaaatgttttgtaaaaaattggttacatgcagaaaaatataaaacaaacctcccttaattatactaactagagataaggattgtattgtgtttacatcgttatataaacaaatactatataaataaaatttaaaagggataaattgtgtaatttctatttttttttaggaaggtcttagtccatttatacattaggaacatcttttcataaaactatctcaaggctgaggctgtagatccatggtaataaatgtataaatgtaacacacataaatatacacatatttacatagacatgcatacacatacatgcatatgcacatacacaatacacacatgtgtacatacacacacgtgtacatacatacatacatgatgtgtgtatgtgtgtgtaaatatccctcctgttcattcagtgtgtattcaaaatgaggtttcagagctgccttccaccttttgtgatagcattgtgtttatttaatgctttctggtggtgaagcttgattgatacttcatgggaatcataaaatgaattggtctactttttctcctctagaaagtattttttgttgtgtttttaaaaatatttttgttgttgttttgaggcgcctgaaacccttaattctgcctcagctctctagtgctagcattagaaatgcttgctttcacaccaccctctagctgcttttaggatggagagggggtaattcctgtacatagacataaggaactattgcagaatatttcattacactgtgaacctgtgattgtgttacttattggaaaaaaaaaaaaaaccactgtttttagttgtggtgtggctcagcctttaatcccaaacagtgatgataaagttagtttgtagaaggaagcacccatgtttgaaaaatgatctctagttgagtggcagacaaagtgacaaatcagagaaagatttgacagaataggctatgcccagctctcaggagggagaggaaagggaagctatgtaaaagagcagtccagagagagaaaggacagtaggaggtaattttacagggagagttttagagacaattgaagagacacacgtgaagacaggagaagccaaaagattagaacagattgctaatgttagtttgagaccaagcagagcgattcattcaggagaagcagagggggaggagggagattgaatcagtcagcttggagaggagtttaagccagagttgaaccaaccggccagagttcagaaagaagtaggaaagggtgagcttatttagcagtaagtatccaaggctgaaacattctaaacctagattagattgcttagaggctagaagctttcaggataggccctaattagcagactgaagcagtaagcctctgagacagttatttcagcagaataaaagatacttttacaagggacccaggaagtatccctcgtctgtcagtgtgtgtgctcccagagcaagtgcaggaaaccttctaggaacatgttatggtttgacttgtactttgaaggctgggcaaggcagagtgtggatttggaggaaagccagatggaaaatggtggaaagagggatgagtgagcagaaaagtatttcatttggcaagagattcaaatgcagaagtgaaacaaaaacccccaggggcccaggctgtcctgggctgaagagttggggtttatattgtgtttgaaacaggatgttttgagtagaagtagctgctggtggatgtgctattggcactgtttagatgttgtgaggaatatggagccagtggcagaggtccccagacaggaacacagatcagactaaaaatgagaagaagtagattctaaagccaaaatagtaatagttaaaacagaagagacatggggtttgctttgggttggttggttggttttgctagaaagggcaaaactaattctgagatgtttgtggggtaattagatggaaatcagctcagggaacatgaagactgtgagcccttgtaacctgtcattacatgcaaatacatttttttaatttatttttttattaggtattttcctcgtttacattttcaatgctatccccaaaggtcccccatacccccccatcccctacccacccactccccctttttggccctggcgttcccctgtactggggcatataaagtttgcaagtccaatgggcctctctttgcagtgatggccgacgaggccatcttttgatacatatgcagctaaagacaagagttcccgggtactggttagttcatattgttgttccacctatagggtttcagttccctttagctccctgggtaatttctctagctcctgcattggaggccgtgtgacccatccagtagctgactgtgatcatccacttctgtgtttgctaggccccggcatagtctcacaaaagcaagttatatctgggtcctttcagcaaaatcttgctagtgtatgcaatggtgtcagcatttggaagctgattatgggatggatccctgcatatggcaatcactagatggtccatcctttcatcacagctccaaattttgtctctgtaactccttccatgggtgttttgttcccatttctaagaaagggtaaagtgtccacactttggtcttcgttcttcttgacaaatacattttaattgacacattttgcaataggtggccagtgtattccaggtgcacagccacactaggctttgaacataggctttgaactcaggtccttgacgcttgctcagcaatccctactatggactgaacatctctgcagcccttaatttctttgatatattaactacaagtttttattttattttttatttttttttggcagggctagagagaaggctcgtcagttagaaatagttgttgctcttacaaaaaagacccgggttctcttgccagtgcccacatggtggctcacagacatctgtgatccagctctctgggatccaatgctttttttttttttttttttagttctgtggacaccaggcacacatgtggcacacacatacacccaggcaaatgtgcacatacataaaataaataaatctaggtgggttatacatgtcacgagtccagtgtatactttgaaatttgacaactcttacttttcattcatgtgtctattttgtttcatatgtttaagatttattttcattcatttttgtaaaagaaaagattcttatttcagacaatagatttaacattctactttttaaatattttcaccccagaaagcatttcttttgacttgtttcagtacttaccaacaccttatgtcagaatcaatcattaaataggtttttattaaacatgtgtttcctactggccaggtgctgttcagttctgcaccctgcacacctattgtgttcatttgattactgtagcctagcactgcttagtcatgaaggaactgaagcactttattcactatgatacttaaggaaacttttgtgattgaaaagagaaattctatggcccagcgggaattgttgctagtttataattctttgtactgaattcatagtatgaagtagctctcaatagagatttaataggtggttccgcggagaggctctgaattcattattgctagccacagaaagctggtgacagcaagaacccacttctgtgctgaatgtctctcctgattaggtcaggcttcccacacggagcttgcaggccttctcctcatttcagaaatgactgtttgcagtgctgctcacttgcaaaaacatctcctaggacccgacatgctagtgtgctctgtgaactgataaacagttaagtcaccattcattctgtttcctagtaaagaaactctgctctgtctttagatatgttctcaattaagtaccaggctggagaaacagcaagcagccagcaaggaggagctagaagcagtaaaggtaagacgcgtgatgtcatttcttccgaagccatcctcagagacccctctccgcactttgtataatgcactcagacactagggcgagtcttagtcctctttcctgccccaggcatgtctttcctgatatttatgctcctatagctaacatgggacttcacaggcaaggtggtaggaaaggagagactatataagccctgagtcttgtgtcttcttgggtggtgggaacccactcaagaaagttcagcacctcacatctgactgttgatctaatagactggcttccatttggattctgcaggattatcctgacagtctcttcaacagcaagcactactggaaaaaacaattgattcagcaaagaatttttactttcataataaaatataatatagtaaaatataagagaaaacaaaaactgtcatattggagttggacaagacaaacagaaggaaaagaacccaagagaaagcataagaattagaaacccacttattctcagacttatgaatcccataaaaacactgaacgggaatccggtttttaatgtttttcgaggaaaggtattccagctatttttatgctgccccctggtgggtaaaactccttatgtcatttctttattttagaaaaggcattgcttgtttcttagaaataggagaaatgggagcagtgaatatgatcaaaacaggccgtatgggactcctgaagaactaataaagataacagtacaccaaatggattggtattctcaataagaatcaatgtacaatatcttccttttgacaaattttgttaaatttatttttgtatacattttttaaatgtagaagtgttgtgtctgcatgcatacctaaatgccagaagaggacatcagatcccttcatagatgggcctctggaagagcaaccaatattcttaactgctgagacatctcaccagcccacaataaattcttacaaatacccaatacagtgttagtttgccagatagctttctatttgaacatattcaggttcacatatgagagtgtcctagtcaaattagcatttaatggggttgaaaatttaacttctctaatcttcaaagtttttcttcagaatagaacattgcatgtgtcataattttagagagtaagtaaggtaagtacttaggttaatttgggggatgatacagcaggagctgtccttacagtttaagtggggttttctcacttcatggtacaaaacattaattgaggttcttagaaaaagcttgttggccagacagtggtggcacacgcctttaatcccagcacttgggaggcagaggcaggcagatttctgagttcgaggccagcctggtctacaaagtgagttctaggacagtcaggactacacagagaaagcctgtttcaaaaaaccaaaaaccaaaaaagagagagagagagagagagagagaaaagaaaaggcttgtggtcttttttcctaaatatactaaaattttagggtcacttttttccctgtctgatgtgccttttcatttctttttctacttagcattttccattctttctacgttataggtccacttgtatgtttgaccaatatgagtagtgatacatcatgattgaagtcttgaactaaaatctttgtggaaataaaacccaaacaatttcattgaacacatagaaatggtttcattgagaaactgttattgtatacaaaattgaactgtccttttgatataaaagtacaaaggaaaaagacttggaattttcctgtaaggcaagttacacacacgttcatacacaagcatcatttaggaatcataggacagttctgcatttagatcacactggcagaggtgtaggatagacaaaacctaagagctaccagccagagaactttagggactaatgcaggatgcatagcattcagctagagagaagggtttaaaagaatattctaaaaaataaaaaaatattaaaaaggaatattctagaaaagcagtgaggacacagagtcattatgtcattattcattagaggagacagatgtgattacaataagtgatggagaaaaacaagaaggtaaggtcagcaactgaggggctggagagatggctcagcggtggttaagaaactcactgctcttctaagggacctgggttcagttccttgtacccatatcgaagctcacacttgtctgtaactccagttccaggggatctgacaccttcctacacacgcacatgtaggtaaaacaccaatgcacaaaaattttttaaaaaatttttttaattagctaatgaaaggtgatggcatcctaaaagagaaaggtgaacttgcacaaggaagagtgactagcttttattagtacctgttttatgcactaatctttgctgtcctaaggctttatgtgccttcgtccttgtagccctacaactaccctaggaaacagacaggattgcatcttccagcgattgaaaggaggccccaaatggatggctaagtggttgaattacaatactggtaagcagcagaaataggatttgaacccagagtcagactctaattcatattcttggtcattagcttgccatgctgcttcagtatctcatatggtatgatgtgccagactggttccttagtgtctatagtgctgtgatgtctccagtccatccgctatactgtaatcacaacaaacatgcccatatacaaatttttacctcagcaccctgtgtgtgttttacttccaagtacatataatcaacccaaaacaatgctgtcttaaacacaaaagggatcatgttttagagaagtggattcttgttcattattgaaccatgtccgcattatcctagcaataaataacaccttaaaaaggtgcttctctttttccactctaccccaagggcttccgtcctcaaggtcacataagaaatacttgttaactgaagcttattccactattcctgcatcccaaggcagaacttttggccagtgaggatgcaaggctttaacaaccttgttctagcagagtaggatctttctagccctgggaagtcttctgaaacacatttctgcttatatatcagaacttaattcatggttgtacttaactacagaggagtctaagaaatatcaccattgatatggacatgctgccagctcaaataaaatcagggtttactactgagaaaggaaaggtggatattgggtgggaattaccattattggccacactttcccttacctaccagactgcagctccacagcgtggatcttgagcgtatagcatggggatggtggaatgaacccatcatggtatataaggacttagaccacgtagaaccctgatttcttacttctagctgccatgtcacttaaactttgcccatttcagaatccttgagttctatgaaggtgtgccttcctgtgacatccatctattctttcattttgttcaacttaaaattgtttatctaagagtcaatacccttatttaatatcaagtaaccctctccccatctcgagacagttgaaataggctggagagtttgcttaattatttggtagtttttcatcatttacaatgcaataaaaagtcagtatgcatcatttaggcatcaaacatttagtcaacaatacaagaatggcagatagtgtgttttattttgtgccagagctgggttaattattgccataggttaagtaagagattgaagatgtagtgttttttttttcagtgtgtccagtgaatattactcaacatcagtgtgaagagtaactgtattagtcagagttctctaggaatttgttgatgacttacagtctgtagtccaactccctaacaatggtcagcagcagctgtgaatggaactcttaaggatctagcagttgcttagtcccacaaggcaagcaggcaaagaagagaaagtcttccttcttccaatgtccttatctaggtctccaggagaaggtgtggcccagattaaaggtgtgtgccaccacacctagatctgggacttgctttgtcccaggtgatctttaactcagagatctccttgccttagtctcctgggattcatagctattatgcctcaatatctccatgccaagatccaggtcagaaacttctatctcccagcctcaatataaggatcacaggtgagccttcccaattctggattgtagttcattccagatattgtcaagttgacaaccaggaatagtagcttttggagaaaatgagagacaaactggacgggattgaaaagatgaaacttgagcttgggcctgaatgggaagagctcgactgtgtcaagatccagactcgactgatcaaccgacatggctgatggagtagcaaatccaagcaactggcgtggtggctcacaaccatctgtaacaagatctgacgcnnnnnnnnnnnnnnnnnnnnagttcaaatcccagcaaccacatggtggctcacaaccatctgtaacaagatctgacgccctcttctggagtgtctgaagacagctacattgtacctacatataataaataaataaatcttaaaaaaaaaaaaaaaaaagaaaagatgaaacttgaagacttgggcctgaatgagaagtgcttgaatatgtcaaatcaagactctagtgatcaactgaacataggctgatgaagtagctaatgaagacatggcatcgaagttatcagacctaactggtggagtcacccagaactgtggtgaagttactttatggacacgtgaaaggactctggttatcattatgggcacattgaacttctttaacagtagggcattcaaataagaagtatatattttatctctaattcatttttgagtattttaatgaagcaagaacagtgctatcttaaaaaaaaatttgcttattagctgtggcatgcatgcccagcaatgggagcatgtagttatgttacttttatttccttaaactcatgcttctcaactcctatgctaagaccctgtaatatagtttctcatgttgtagtgaccctcagccataaaattagctttgttgctacttcataactgtaactttgctactgttgtgaatcataatgtaaatatctgtgttttaaaatggtcttaagtgacccctgttaaaggttcatttgatccccaacgagatctccagccatagattgagaactgctaccttaaacaatgatatttatctttgcttaaagcagaacaaaagggtttgaataaggaatacttgttccgggattaggtggatttgtgctgactaaccatttggtgatcacaaataaaacaatgccttcagcaatagtctgtttgaaagcaatgtgccattgttaaaatcatatattattttggtaagttgtttaccctatacaatacagtttaatgttgggtgtctctttcgtgtgtttcagggtaagatgatggcatgcaaacactgcagtgatatcttcagcaaggaaggagctttaaagccagtggccgtaaatagagaggaccagggacttgaagcagatgatgaaaaggactcacttaagaagcagctgagggagatggaactggaactggcacagaccaaactgcagctggtggaagccaagtgcaaaatccaggttggtcattggataaacggccaaaagaacacaagacaagcaaacaatgctgttttactctagagaaattgcacaggcatatagaatagatctgaaaatctcacactactgatagtaagtcatgaaaagttgtatttttaaacaattctaatatgtagatagtaagtttctacataaagtaaatttgatttgtaagatggcatacttttttgatataataattatattttggctgaattttatattatgggacaagagttattatcaatgttattcagagttaattcatactttaattttgtaattgtcaattctgagactgccacttcacataaatacatagtaccaaaatgcaaaatatgttctggatcatgtaactgcaaagtatgttctggatcatgtaaccatagattctgtcctaatttcaagacaaaattaattccatggcttaattttaatgaaacttgccagcaacttaaacaattgatttatttttgtaattttttaagatttatctttgtgtctgggtattttgcctacatttatgcctaaacaccacatgtttacagtacccacggaggacagaaaagggcattggatcccttggaaatggaattacaggtgggtgctgggaattgaacccagggactctggaagagttgccagtgctcttacttagccttctcgccagcccccaattttttgaaattttttaaaagcagcctaagactctatagttcaaatacatatcactttgatacatacgtgttaagaaatgatggaaaacagtaacatattttctataaataaaactatgcttctctataagaacagaaatgtttgtatgtacaataaaaatactgtaacacattaacatacacaagtccaaaagcagagccaaagtgtacttgaagtcgcatttgttggtactgtgtggcatgatggcctgcccagtgcaacatgcagtttgtgttcagaaccagggctgacatgaagtcacatgatagatatgggtaagtatagacaaagacctcagattcactatacctttggttttgagttagttttttagcattgccaaatgtcatgaccttccctacctcctgtattgagttatgtgacccaacatgttggaggagtttcaacctatactttaaaaagctgaacttacacaggatcagggcatcttccttcaatccaagcactcaagagatggatgctggtgtatctttcaaagtttgaagccagcctgggctatgcagtgaaaccctgtcctttaaaaagaatctgggctcccaaatactgtccttggttagagtcatgatgtacctgcatgtggcacattttgtattcctaatacatcctggaccatcatatcttatagcatgtacccatagacacaaacataatgtaagtgatttttaaataattaaagttatgttttatgagaacttttagtatgctttttgtttgtttacccttcacatagtcaccgtggttggcagatctgaaaatgacagacccaagccctcatctgtttttaacttcacaaaagactaatcctcctctttcctttggagctgttttgggtctcagctgatttttaccaaattcctttctccattctctccatattggataatagcaattagaaaaatgtgtctgttgtcttggtggactgatctgttgctttttaccagtaagccctgcaccccacacccacacccacacccatgctgcattagggatcctcagtaccatgtcttgtcaggaacccgaatgttctcagggcaggatttgaattggaactcatttgtactcatatttgtttgtggttttaagcatgtagtctccagttgcatcctaaacctaaatgtagacctaaatagcaaggagatagggaaataaaatgtggttcatttctctattcatagaaagcacagattctcattttcactagtaactgttttagctctccacttttctcttccattagaaagccaactaaatgtctcctgggctttgagggagggctggctgcagaggcctggtgaatttaaacagcatctcttaatttcctctggcatttatatgacctgtaatcttcttccactaggaacttgagcatcagagaggagcgcttatgaatgaaatacaagctgcaaaaaactcttggtttagtaaaaccctgaactctatcaaaacagccacaggcactcagccactacagccgccacaggctccccagccacccaaggagagcacatagttccagcctcagccaagcacaagagcacaatgatcaaaacatcagaaaccaagaatttttcctgttgtccctttgaagaaactaaaggagaccagaaagcaagttagactcttttcagtagctctgtctttgatggatgacattttttcagagggatgttatttaaactgacctggtttatgttgaatatctatttcccagcttcttcatggaaaaccacattcagctccatcatattacacattgtgttttatatgcctgaaatttagttggaaatgagtaatctaaaactaaatgcttttgtttagaattaactattcataataaattttatcttacataaaaatgaagacatgttatcccaaggttgaaatggtaagatctttgtcacagaagtctgttttttaaagggaaactaaacctcttttaacgttccagaattattcatataaagcacaccgtggggccgcacatgatcactgacaggtttcactctgaaagtgacttccagagtagtgttactcctgtccaagaaaagaacagaccaggggttgatttgaaagtttccctccaagtattttgagttggttacatttggaaatggagggccaatagctgtggagtagatggactactgcactctagataaataaaaactttaaataaatgtgcaaaaaaat

SEQ ID NO: 242 - DNA, 1505 bp, Mus Musculus
acactgcaggtaccaaccaaaaagctgaagaaatatgaaaaagaatatcaggcgatgcgggagaatcagctgcagcaggaggacccaatggatagatacaagagggagaaccgaagattacaggaggccagcatgaggttggaacaagaaaatgatgaccttgcccatgaactagtgacaagcaaaattgctctgcggaatgacttggatcaggcagaagacaaggctgatgtgctgaataaggagctcctctttaccaagcagaggttggtggagactgaggaagagaagaggaagcaagaggaggagaccgcccagctaaaagaagtcttcaggaaacagttagaaaaggcagaatatgagataaagaagacaacagctatcattgctgagtataaacagatatgttctcaattaagtaccaggctggagaaacagcaagcagccagcaaggaggagctagaagcagtaaagggtaagatgatggcatgcaaacactgcagtgatatcttcagcaaggaaggagctttaaagccagtggccgtaaatagagaggaccagggacttgaagcagatgatgaaaaggactcacttaagaagcagctgagggagatggaactggaactggcacagaccaaactgcagctggtggaagccaagtgcaaaatccaggaacttgagcatcagagaggagcgcttatgaatgaaatacaagctgcaaaaaactcttggtttagtaaaaccctgaactctatcaaaacagccacaggcactcagccactacagccgccacaggctccccagccacccaaggagagcacatagttccagcctcagccaagcacaagagcacaatgatcaaaacatcagaaaccaagaatttttcctgttgtccctttgaagaaactaaaggagaccagaaagcaagttagactcttttcagtagctctgtctttgatggatgacattttttcagagggatgttatttaaactgacctggtttatgttgaatatctatttcccagcttcttcatggaaaaccacattcagctccatcatattacacattgtgttttatatgcctgaaatttagttggaaatgagtaatctaaaactaaatgcttttgtttagaattaactattcataataaattttatcttacataaaaatgaagacatgttatcccaaggttgaaatggtaagatctttgtcacagaagtctgttttttaaagggaaactaaacctcttttaacgttccagaattattcatataaagcacaccgtggggccgcacatgatcactgacaggtttcactctgaaagtgacttccagagtagtgttactcctgtccaagaaaagaacagaccaggggttgatttgaaagtttccctccaagtattttgagttggttacatttggaaatggagggccaatagctgtggagtagatggactactgcactctagataaataaaaactttaaataaatgtgcaaaaaaat

SEQ ID NO: 243 - protein, 274 aa, Mus Musculus
TLQVPTKKLKKYEKEYQAMRENQLQQEDPMDRYKRENRRLQEASMRLEQENDDLAHELVTSKIALRNDLDQAEDKADVLNKELLFTKQRLVETEEEKRKQEEETAQLKEVFRKQLEKAEYEIKKTTAIIAEYKQICSQLSTRLEKQQAASKEELEAVKGKMMACKHCSDIFSKEGALKPVAVNREDQGLEADDEKDSLKKQLREMELELAQTKLQLVEAKCKIQELEHQRGALMNEIQAAKNSWFSKTLNSIKTATGTQPLQPPQAPQPPKEST

SEQ ID NO: 244 - DNA, 312071 bp, Homo Sapiens
  misc_feature (1)...(312071): n = A,T,C or G
ttttctctaggcctactctgtgtatgatgaagacattgggtactgtcaagggcagtcttttcttgctgctgtattactgctgcatgtaagtaatggtccgtgtgataaatagcacagtgctgccaagtttattttactttctactggctttgttcttccttcttatttcccatttatctgatggagattacatatggcatatcttttttaaaatgtacgttaggtgataaagtaagagatatgatgtcaaaaatacgacagtttctcaatggaattagttttgttggctagaaaaggataaattgcttatttggagttatttttaactagaatcctctggaattaaagaagtcggtataactgcccaaatatcaggacctggaccattaagacccactatactgtgacaaggaagtcctttatcatttctgtgatgtatttttatatatcctctttcctgtcagttaccttcatttgacagatcatttattgagcatcaattttcaggtactgggctaggaagtggggttataaagatgaatcatttataatttgtgttctcaaagacttcatagtccaggatggggcacagataatgtaggcatgaacttataatttttgttctcttttatgtgtctttatttttctgatgacaaaaataatacatactcattaaataacttacagtatgctaagtgaaagtgatacacaggttaagagaatagagaggagaattacccaaccaagctctgccagaactttcagaaaagactttctggaggaggtggcagctttgtcaagacagaaatgagattggagaaggtgagaggggaaagggagggggtaaagaattattgacaaaagtcacaatatgagaaaatgtatggaagtatgatagggcacagcatacaaagggaacaatatgaaatcacagtttactatagcaattgtacacggggagtggtatgacgtaaaaatggtaagatgggaaattgtgaagactttgtaatgtgtcaaaaatgcaggctttattctagagctaatgaggaaccattgatcactttggagcaagggaataatacagtcatatgatcattttagataaatcttttcatacctgtgtaaagggcagaattaaaggaaacagacagcagcagagagaccaggtagaaaacatcaatatggccaggcacagtggctcacacctgtaatcccaacactttgggaggttgaggcaggaggatcacttgagcccaggaatttgaaaccagcctaggcaatataatgagacaccatcactaccacacacacaaaaggtatctgggtgtgttggtgagcacctgtagtggtggtgagctacctgggaggctgaagtgggaggaccacttgagcctgggaggtcaaggctgcagtaagccttgattgcaccactgcagtccagcttgggcaatagaaggagaccctgtctcaaaaaaataataataataaaaaggaaaagaaaatgtcagtttaaatgagagatgttgagaacccagagaaaagcagaattaagaaacattcagggagcaaaattgttaggttttgtggatggattggcaaaggagcagtcaaaggtgacatatctagtttcctggctttggagactggatgaatgttgtattttgagttcagatagcaaatatatctatggagattgaatgaaggaaaaagtttaggagttgatgatgatgagttctttctttctctctttctttctttagagacagagtctcactctgtcgcccaggctggaatgcagtggcacaatctcggctcactgcaagctccgcctcccctgttcactccattctcctgcctcagccttcccagtagctgggactacaggctcctgccaccatgcccggctaactttttgtatattttagtagagatggggtttcaccatgttagccaggatggtcttgatcttctgacctcgtgatccacctgcctcagcctcccaaagtgctgggattacaggcgtgagccaccgcgccggcctttatttatttatttatttatttatttatttagatgaagtctacctctgtctttcaggctggagtgcagtggcatgatctcagctctctgcaacctccacctcctgggttcaagtgattctcctgcctcagcctcccaagtagctgagattacaggcatgcgccaccacaccgggctaatttttgtattttagtagatggggtttcaccatgttagccaggctggtctcaaactcctgacctcaagtgtgccgtctgccttggcctcctaaagtgctgggattgtaggcaggagccgctgtgcccgtctgatgataagttttgtttctaattatttgagttcaggatattcttgggacatctaggtggagatatatgttcagcagccagttgcatactggagattaatgctggaggagaaatgaaagctgaagtcatgagagtacatcagatcatctagaagaatgaatagagtaagaagattaaatcccaggaacagcaaacatttgaagggctgatgcggaagtaaaatccttaaagaagttcggattctcagtagggaggaagcaatgaatagtgtcaaatgtaacgagaggccaaacaagtttaaaaggacagcattgtttttttgaggtttagcattctggaagtgaagagcaattatagtagattcatggtcctaattctgaaaacctgattttaattataatagttctattatgattttcactttgtttcactttgaggttgatggtttttttccctctgttacattattatctgtttatgacagtttctgtcttcttgttatccttctttctttgatttctctacatctcacctttttgggacttcctgtgatgaccagttactttatagtcacaaattctcaggggcccttgttccccttctaaacccactagaatctagaatagtcaggtcccttccctaagaggctggagaccatacccagtgacatggatgttttcttcaaggctcagagccatctttcttctaaaggaagcctttataattacttggatgagaagctgaagttcaagacatgggtggtgaagctttggtttgaacaaagcaatctttttttttttttttttttttttttttgagatggagtctcgctcagttgccaggctggagtgcagtggtgcaatctcagctcaatgaaacctccgcctcctgggttcaagcgattctcctgccccagcctccagagtagtgggactacaggcacacgtatcaccatgcccagctaattttagtttttttttcagtagagacagagtttcaccatgttagccaggctggtcttgatctcctgacctggtgatcctcccaccttagcctcccaaagtgctgggattacaggcgtgagccaccacgcctggccacaaagtgatctttgaacataccgtagtttagcattttttacctgtagccctgtttaacatattataatatatttattaatgttcagtgagaagaatatctctctgagaaatctgttttggatttgacagaagtttgggtcaattataagttcataattatttggaaacaccctccccaccccgtccgcaaagagagaaagagagagattcaaataacgagagctcaaatacccagaattttttttctacattaggtactctactattataagggccacgtagtgagtcagcctttgtgaactccaacaagatagcttccagtgtatgttacaagagagacagaaattcagtctagtctctcacactttctacattaatagaattattcagtgttgtcatggcttttataaaaataacttgaaatatagaaatccttttagaatccttaaggaacaatgaactgatattcagcattctgttaatgaaaaacatattctaatttttaattggcagtatgtttgataattctgttaattagcatattccattaactgaccaacccatccattcaaccaatttgaataacagaagttaactgtaatttattttttactatatttttgtctccctggtttaaacaaatagaagaatacggactggtttaaacaattcatcaaacacactatctcaggttccagggagatacattattagggtcttactgactaatttgttatcagttacataagctattgcttctttttgctgccagacatctttggaagctccatattaatcactgtgagagcctgcttccttttgggttctgtcctttcctcacccatagtcatttatatttcacattcattgcctgagaagaaagtaagaccaaaaatgaaagtatgttcaaaaacagttttgaatttttaggattttttcgtgtctaagtagtctaaataaataattagcctctccttgtacttggaaatttctagatgctttgacaatagctttgtaacatgtagtagtttagacaatggaagaattaaatgtttatcacagtagactcttacatccatttatgaaattacaagaaatttgtcatttacagttggagaatgttatagtacagattgcctgcaaccattataatgttcaactgcctttgtaatgaaatatacaataataatttctaatttcataatcatgatattagtctttatctcttagtcttaataaattatgacctgattatatttcacttactctaaaaattatataaaatattttagataatttgtaacccaataatttttctacaatatttattgttacaagttttaaattttttaattgaacatgtacctttttagacattcagaagtttatgttcatttttaaggttaaattactgtatgtatactaatattggcatttatagaagctttccaactgcaagaaggattatgtttgaataatctagcatgtttaaaactattgaatttttttaaaaaaactatgactaggtacaattcctttcgaaaccaatttggctttgtctgataaagatatgcacacccagaagttttgctcctagacgtaccttagtcaaatttacgcacttgtacatcaaaatacatgtattacttttgtcctaattaatagtgtttataacagtcaaaacactgaagcaactcaaatgtccactactaaaatgtccaatattagaattgtaattagacagtaagatggctaaattatgatattcttagagtatgaatgccatacagcaatggaaatgaatgtttcacactacattgattcatataaatgaatcatataaacataagatttagtttaaaaaaagcaaagtacaacattacatttggtatgattccattctgcataaagttcaataacaagcaaaactaaattctatttttaggatgctagatagatggaaaaaactataaagaacaccaatgaagtggtaactgttaaagttacgaaagtgatttctctagggagaaactgggaatcatgactgaaaagagacagggattttcagggctatcgacagtattctctttcttaacctagatagtggttacatgcatcctttgtaagtttttttagtttataatcaagtattaattaaagtgtacatttaacttttatacatttttctgtttgttgtatttcagagtaaaataaaattaaaaattataaattttaaaatatttctcaccaaaaagacaggtttgggataagatttaaccaatggaagtaaataagaagcagaactacctattacagattccagagtccaaggtgacaagataaaggcttcattttgaagtctctatcgtatatatatatatttataacatatatatatgttaagtatttgtggcattatattattcaagactctttctgctgcatgtgacagaattgactcatataactgggaaatctagggtcagagatgatttttcacatgattggactgcagagttcatattttgtcatcaagaatctgtatctctgcttttcttgaattttattgtcttaattatgttagtagacaaaaaagtggggcaaaatgactgttggctggcctggattcatatgatcaggacaacttcatttaaaagggactattttttgctacctcgtttaaaagggactgtcttttgctatagctcctgcatttatttaaagtgacacacaacaacaccaccaacaactccctctgtttttcttcctgttggactttggcctggttgggtagggcattctaattgtcacagcccaggtctttagtcaagatcagtgaacaccatcagcccctcctaaacaatggaatggtcttcctataggaagaggggttttgatatcagatgatgggacagtaggatgctaaacaggtacatcacatcatcttgagtgatatacttactacaagatttttagtgtatttaaaaagtaagtcctatacttccaaatcacttttccttctagttcaagagaaagaagcattcattttcctattccaagttaattcttatgaagtgcttttgagccattttccaacatctccctgtgtcctaatacacacaaacattttacctatttaaaaaatatttaactactatcttatgtctctctgcctttttgaagctgaactctttcaaaggatactgaaaagtacaactgtgaatttggattgtggtttaatacctttcaagttatatggctttgggcaagtttcttcaactgagctttagtttcttgttatcatccttctaggcttattatgagtattgagtaccttatgatgagtgtaaagagtcttacatattttgtacctagcacaaaaataatgcagttatgagattaaaaccaggctttacttaatagacctatagttactggcaagtcatttaacttctttgaacttcactagtattatatttataatgtaaaaataatgcctaccttgcaggatttttgtgaatatcaaatggggtcatgaatgaatatgtctaataatggtaactgttgctgttattttttaaattaataattatttgcttttacattaataattatttgcccagccagttttcttttggtccctggtccaactaatttgaatggattacacataggagactaatatatcatacagtgatagaattttatggcttatacattgacattcaatttaaatgtattaagctatttgatttaaagggagaatagacaaatgactagaagttttcattctatttgctttttaatatgtaaacaaaaaatgaagacatgataaataaccttgagtttgaaggttcaccagcattcatctttttttttttttttttttttgagacatggtctcgctctatgacccaggctggagtacagtggcaagatgttggctcactgtagcctcttctcctgggttcaaggaatttttctgcttcagcctgccgagtagctgggattacaggcacatgccaccatgcctggctaatttttgtatttttagtagagatgatgtttcaccatgtgggccagcctggtctcgaactcctgacctcaagtgatcacacacagcctcccaaagtgctgggactgcaggcatgagccaccatgccgggcccattcatttttgttgaagaaaattgggaatatcagtagagtgttcatctccttcatagagaaaggtagatcattccaaaaagatgtgaaacacatcatgtgaagcaggaaatttagttttacactaactatggggattactttaaattatcaaaatgtagttttacttcaaaaaataccttgatgtaaatgatttcaggtgcatcttaaagacttgaaatacttagcactgctttgttttatagtttcttgtggagagaagtagtgagggcttggagattgtctccattcagtgatcatcacaattagtacagatggcagatcattatcaacatttattaccaaacggtgattacatcactcaattctcaattatgcatgtgaggcaggtatttttgttttgtatttcataaagccatggatgatattttgatatcttaaattataatattttaatgtttatcccctcttttccttaatgaaataacactggtgataaagtttctgtacacagcaaaaatggacattcagtcttagagacccaccatattccaacaccttaatattttatttaaagatgtgttgttcaattatgtatttttattgtaactttagaccaattgcataaattggataaattggattatcttattctatgaagcattaatcattgtaataagttaaatagtcattttagtgctttttttttaagtaggtaggtaccaccgtactacctcgtggaggaattgcacgtactaaggtgaagtttgacagtacaacctagcattgcatctcacatcttggttgattttctttatgccgattgagggataagctgaatagtcaacacaaaatatagataatataaaagctttttatatttagcatttggaatagaattacaggaaatcaagtgctaatatagttgcatttggctgccccttgcttctagccttcacaccaatactttccttctacatttttgttggcagttaccaacagattgccctacttgtgtggtatgacttcattaaaaaggcagatatatgcagaattttgctagtttatcttaaagaaatatttaacacttgatatttattgaaggttctatgccaagagttgtggagcggggggtacaacattaaagtggtggttagaagtgcacaaataactgtaatggtatacaacaaagagttttgggattcagagaaagcaggggtctcctcacgttaaagagaaataacaaagtgccacttatgatcagttttaaaagatcagtaatattttaaaggcagagctgtgctatagagtatatcccaacccagttattccctctgagcttgtatacaaaaccatgtggagaaccttgaaactgcagtttgtctgagtcataaaaagcatggggaggaggagggggacattcttcctagtgatacacaagaaatgctgtcacttatatgaaaagcagcatatttttgctgcttcatgttatcaacttaaattccagcaaatcattttaacagaaagatcttagagtaaaaattttacctatgcatctgtttattcttttgagtatccttgtataaagcactttggtaattgtcaatgtataagacagagtctctgtctttaaggaaggaaagataagagaaatttacatttagtgattgccaacaatatgtatatgttgtctcttaaatatatttcacttaatacttgtagcatccctatgacataggtattattatttctaattttttagaagtaaaaaaaatcttaggcattaaaagaggttgcctgctcaaaatcacccagcgagtaattaaaaccttacctgaaattacatctattggtataattccaaaatcatgtatttctcctgcagcgccttttgtatattcatgatctgtttctgggcaaagttttgagaggaatgattgaatataggttcttgtagattatacctttatacaaaagaaaagtgatagattcttagtaaaccaaaatatagttgtccctcagtattgggaactaatgaggaattggtagcagctgcgtgaccttactaaaaataaaaatcagatccgctgctgtaaactcttcactgatttcccactgcacttagaatacattcctaactctttatcatggtcatatcagtgctgtgctacagccaggtcataccagcttttgacggccaattgttaaattttcaggaattctgtgaaccagttgttaagcacagccattgttacaaattaaatgataaaaacttacagttaaataactcatgttaaaaacaaaagtaataagtactcaaaattcatcactttctggttatgttaccactttttactgttgtctgtgctcttgaactatttacattgttttatctgtatgataaaaatggtatatgatggtatgctgcagctctactgttatgcatcacttttctttttttttgcaaatgatattttattttatgcaatttgtttatttactcattcattcaattgcttatttaatcattccttaaaatatataagctgagagctgactatatggatggcaccaggcaaatacaatagatacagtagtgaaaaaaataaacatggtgtcttttgttatggagtccaaagctcagtggagcagtgagtgatactaatcaaacaactgcacaaatgcatctataagtaaattattttaaaagtacagttaaaggaaacaagtaggtgctattaagtacatgatataatatcagggttcaagaaaattttcagagcaaatggcaaatgagatacatatattcagtctgcccttcatgtctgcaggttcaaccaatcgtggatgaaaaatatttggaaacattaataacagtgtaacaagtaaaaatataaataaaaatacattgtaatgacgatttacatagcatttacattgtattaagtattataaagagatgatttaaagtagattactaaaatcatctacttcagtaatgttatatgcaaatataacatatatggttacctgcaaatactgtactatgccattttttttctttttttattttttatttattattattatactttaagttttagggtacatgtgcacaatgtgcaggttagttacatatgtatacatgtgccatgctggtgcgctgcacccactaactcgtcatctagcattaggtatatctcccaatgctaaccctcccccctccccccaacccacaacagtccccagagtgtgatgttccccttcctgtgtccatgtgttctcattgttcagttcccacctatgagggagaatatgcggtgtttggttttttgttcttgcgatagtttactgagaatgatgatttccaatttcatccatgtccctacaaaggacatgaactcatcattttttatggctgcatagtattccatggtgtacatgtgccacattttcttaatccagtctatcattgttggacatttgggttggttccaagtctttgctattgtgaataatgccgcaataaacatacgtgtgtatgtgtctttatagcagcatgatttatagtcctttgggtatataccgagtaatgggatggctgggtcaaatggtatttctagttctagatccctgaggaatcgccacactgacttccacaatggttgaactagtttacagtcccaccgacagtgtaaaagtgttcctatttctccacatcctctccagcacctgttgtttcctgactttttaatgattgccattctaactggtgtgagatggtatctcattgtggttttgatttgcatttctctgatggccagtgatggtgagcattttttcatgtgttttttggctgcataaatgtcttcttttgagaagtgtctcttcatatccttcacccactttttgatggggttgtttgttttttcttgtaaatttgtttgagttcattgtagattctggatattagccctttgtcagatgagtaggttgcgaaaattttctcccattttgtaggtttatgcatcacttttcaactccagtccatttattttctaatattctactctgatctcttcccctacctcctctttacgctcaataattcatggatttgcccttttgaggctattttctagatcttgcaggcatgcctaatgtctttttattctttttgttgttgttgtttctcctctgactatgtattttcatatagcctgtcttcaagctcactgattcttctgcttgatcatctactgttgagagactgatacatttttaagtttgtcagttgaattttttagcttcagaatttctgcttaattattttttattatttcagtctttttgttaactttatctgataggattctgaattttttctctgtattgtcttgaagtcattgagcttcctcaaagtagctattctgaattctcttaaatgtcacatatctctcactccaggattggtccctggtaccttgtttagttcatttgatgaggtcatgttttcctgggtattcttgatgcttgtggatgtttattgatatctgggcattgaaaagttaagtatttattccaatcttcatagtctgaacttatttttacccgtccttcttgagaaggctttccaaagggaattaagtgttgtgatctaagtctttagtcactgaagccatatctgctttaggggatgccccaagccaaataatgctgcaatttttgcagactcgcagagatatagccttggtgggcttgggtaagatctgagagaattcctaaaatctctttttctcttctctcactttcccctgaataaatagtgtttttttctcctcatgctgggcttcctggagttgaggagcagggtgacacaagcactagccaccacagctgggactggctactatggctgcaactgcacttggtcacacctgaagccagcatggtacctgacgactactgcctggctgctgctggtgtttattcaaggccccagggtctttccattcagggtagcaggtttccttctggcccaggatggatctagaaatgcttttcaggagctagggtctggactcaggggattcaggactctgcttcatgttactgtggctgagccggtactcaagttgcaggacaaagtcctctttactgtttcctctcttttccacaagcagaaaaggagtatctcccaagctgccctgcctggagttggggaaggggtgtaagtatagccactcttacttttttgttgttgtttctatttgatcccttggctaccccagctggtgtttcactggattgtatgtaccccaagtccactggcttcaagcccagcacagcaccaggacttgccggaagattgtaatactcgtggcctagactgcttttcaaatttgttcaggacaccagggcactttagtctaccagggggcttcccttctgtctggggccagtctgaatccttccttgttgtgtgcctgctaaattctgccctgtgttgtgttctgctgtgacagggcagcactgagtaccagtgcaaagtcccacaatccctgctctctccctttcccaagtgcatggattctttctctacacagtgctggggggataggataggtgtggtgtagacgatgtaagactgttttttctatcctcttccatgccttcttccttgatatcatgttaaaaccaggtactgtgattgctcacctgattttttgtttttatgaaggtgtttcttgcgtggatagttgttcaatttggtgttcttgagggaggatgattgctgaaggatgattgctatttggccatctagctctgcctcctccaaaattgtctctgatgtttacctttacttccaacacccaacattccctagtctaggacttctgcatccttatgaaactcaagtagagttgcctgtttactcttcccctagggaggcactatacctttatctctgtatccctaaagcctagaacagggcctgcacctcatctgttcagtgactatatgtatgaatgccaaaaggcacataaaccttttatttgccctaatgattttaccacattcaaagaaataaaaacatattccctttataagacatcagatggtaagacatttacttagaaagagagagacttaagtgaattagtatctctaggactggctacagttcagttatcttttttttttctctctctcttttgagatagaatctcaaaactccaggctggagtgcagtggtgcgatctcagctcactgcaacctccacctcccaggtcaagcagttctcctgcctcagcttccccagtatctaggattacatgtacacaccaacatgcccagctattttgtatttttagtagagacggggtttcgtcatgttggccaggctagtctcgaactcctgacctcaggtaatccacccaccttggcatcccaaagtgctgggattacaggcgtgagccaccgcgcccggcctggctacagttatcttacatgcagctattttgtatagccatttgagtagagatctgagaggaagatgaagaggcttacaccttggtaagagaagtattcttggccatatatgttcaagttagtgtcacttgaggctttgatgacaaaggagtaaagaatacagtgtaattgtatcctaaataaccaaacggaagctgaaaaatagttgctaacttgaatagctgaggtcagtggccagaaattttgaaaaggtctcaaacaactcatagataaaaagaaaataagcaaatatttaaagaatcaaaatgaaaacactataatgtatttatttaacttcaggagatgttatttaacaaatttgggtattttgtggtttataattagaaaatagaagtggctgatttgtatgaaatcttgtacaactgcatttctaagtggataaatggaactctacttgattcacttgctgaagtatgaagttagtctaacaaatgtatgaaataccataatcaaccaaatgtaaattttcaaggaagtaatatttaaagtagatgtttgtataatagttacatcctaggacattgaataagtacaactttttctgtatgcttggtgtaatttctagaatattagatatgtccctttccatattctttcacctgttgataccactgtttagaggtttgttcctttgacttcagactttattccctgttcagataaaaatacctctgagaaagctagtatgttagagtttactggccatttccctgaaaactgtattttacagaaagtagcaacatcaagaaaacgcagggaggatagtctcacgctatttaccaaaatttaaaatgcatttattttttcacccagcattcccccttttgggaatgtgctctaccccaccccatttttgcatatgtacaaaatgatacatatgcaaggtttattgaagctttatatgattaaaaaattaggaacatctcaagtatcaataggaaacttgttaaatgagctatagtacttttatataatggaatactatgtaattgcttttaaaaaaataaagagacaactctttatatactgagatagaaagatttccaacatatattgttaaggaaaaaaatcaagatgtataacaatgtatatagaatattatcttttatgtgggatgggacaaaataaaattaaaaatgtaattattttatttgcatagataatcagtggcagaatacaggagaaattatttagagtagatatgaggctatgcaaaagaggttggggggtgtaggtaccggggattagtttatatataatgatagggaggagcgagacttttacctttagatctttttacattgtttttattttattttattttattttttttttagacggggtctcgctctgtcacccatgctgtaatgcagtgacgtgattttgctcactgcaacctccacctcccaggctcaagcgatccttccacctcatcctcccaagtagctggactacacactcatgttgccacactcggctaatttttttattctttgtagagacagggttttgccatgttggtcaggctggtctcgaactcctgggcttaagtgatctggctgccttggcctcccaaagtgtgctttggttttttaatcatgagtgtattgcctgtttttaaaggtagcctaatgaatgaatgacaacatgattaaaattaacaaaagaagataattcatctcaagtaaggaggtcatgtcactctgccaaagactggctctgaaggacttcatttgctccaggccttcagctacttatgcagaggactaataacatgaaggaacttttttgacattctggcaaaatgccacttatttatattgtatatgtatatatttttctgtagatgccagaggaacaagcattctgtgttttggtgaaaatcatgtacgactatggtttgagagacctctacagaaacaacttcgaagatcttcattgcaaattctaccagttggagagactaatgcaggtaaataaaaattaggaacttttatcactcagggatttgttgagtcatagaaaaagcctaatagagttggtaagcaataatgaattatagaagtttaatggaatattatagaaaatgtacatggatttagtttcagaccaatatctacattggtctatcataatatgtttatttagccattttactattttaaaaatatctcacattttaaatgttcaagttaaatatactttgaagtgagaatctaatgagtttaatcattaagagattgccaagtattgtttgtagaggaatggagatatttacagagtaaaaattgaaatacctaagagctttctgcatactaattagcaccacttccttatttgagtccacgtagaacacttggaaaagccagaaagatattcataagagaataaaacatactaaaatactgtagggatacatttaaaaatttttaaatataattcctaatctcaatgttgttgttgtgctttacaatgcgtatttataaatgtgtgtgagaaacatgcatccttttatatataccaaatattacacagtaaaaaagattgtgaccacaggcaaagtgattgaccagagctgacaaaaggaatttttaactagctttggagttctacctgaagttgataatcttaaatttataatgggtttttgtggcatgtttatgtgactttgtttaaaaggggttttgggaatccaagagaaatgtgaaggagatacatggatggattgattccatattggggaagggtaaaatggttgaggaaggaggttcgtggaatgtgagagcagaagatgctagtaggagctcattgatatgaactgccaggggatccgtaggtgtctaaagagggaagtgaagccagtaggagactgagagattagaagaacagggcagtagaggatgaatttgcagtgaggttaaaggaacaatttattgggagaagggaatgtaggagggtagaagactttaaaattgaaaagaaataaaaggaggcagggatgtaaaacgagccataagtacaatgacaaatgggcattaaggaggaaaaagactatgtagaagaatctggtaaatatggatattaacagcaataagctcctttttaacgatttaattctaccaagtaaatatttgggattactcgctttttgccttttatttaccaaaaaattcatatattttcaaaggtcagtattcctaagggctttgagaatcaagtaaatatacctaataaataacagatgtgtggtactatgaagaacctcaaccacatttttctgttagcagttttttttcagttaactgaatgagcatttggacgttccatttgaagtacctaatgggcacatttggctatttttcaaagagagcatgtagttcaagaaatggcttattttgttttttattcttctttttgtggtctatttaggaaaacaaaatgaaggtggcctttgtctttcagttatggtaatagctatgctaatactttgtaccttgctgttcatgcttttgaaaaccatttgcttgtttaaattgggagaaaaaaataaagttaccataaaggcatttttagaagatatccaattttatatattatacctttgcataatttctttgctttgccatttttaatatgctgaagacagatttctaaatagtttgtcgtggcttagaattttctaagtgttcaaaaaatatactgaaacatcatagaccccagattagatgatttccaaagagaagatacatttcttttctagctagttaagaattgaaccctgggctgggtacagtggctcacacctgtaatcccagcactttgggaggccaagtcgggcagatcacttgaggtcaggagttcgagaccagccaggctaatatggtgaaacactgtctctagtaaaaaatacaaaaaataatcgggcctggtggagggtgcctataatctcagctacttggaaggctgaggcaggaaaatggcttgaacctgggaggcggaggttgcagtgagccaggatcatgccactgtactccagcctggatgacagagcaagactcttatctcaaaaaaaaaaaaaaaaaaatttaaccctgaatggggatgctatgacttgaccctggagtcaagatactcattacactacagatgctctggtagaatgagaattttgcaagaatcaagaacagtcaagtgagcaagagatggtctttcttagttgtttataataagtctgtttttattttcctcaattatctgtcatatccctaattctcatctgctgtcatcacttctgtgcagttatacaagacaaccaatactagaatagagttacagcgatcatagaaagctgtttgtaagttgcagttgtggcaggaacttcattgttctgctgcaagcttctcattgctcctaaattttccactttgacttttaggaacagctaccggacctgcatagccatttttctgatctgaacctggaagctcatatgtatgcatcccagtggtttctcactctttttactgccaagttcccactctgcatggtgttccacatcattgacttactgctttgtgaggtagagtgactcccatctttcactaagccaaaatagaaagtagtttctactaaaaatggttacagttttcttccttttgtttttgcctgtgacattaagccataaatactcactgaccaaaaagctgtatttgaattttcagtaaaaactattttaattgtaattttattatttctgaggaatgaaaatgttaaggcatatataattcctacaaagtaaaatgggtgattaaatttgcataattaaattcataataagcctatatctgtataataatgttttaccagtataaaatgcctttaaggttaaataaatgaatttagaattgggtgttttttaatattaatgcagttatactgcaagagtgaatataaatgagatttttataataactaatttctcagttcatcagatatctttctgtttatcatgtttgggactgctgcgaaatgatgagacaaatgataaactaaagctattatgtcatataattatatttttatatagtagaatatttcaaaaattagtttgtaaaatttcttaggtgtttatatttgtgtattttattgtttttagttccttagatggctatatttatttactcttttaaagaaataaacagtattatgcatatatatggcttatattggtcatcaaaatgtttgactatcttagcagtaatagggaatttgctagataagaagtgtatattttcaatggcagtataaatgtatataaaatatagctatcttaaaaagcaggactaatcaaaagtataagcttatctatgtgattataagcttaatatataatctagacagttttgtattactatgcttcttaaggtaaacatcctttaaaaaaaattttttttgtataaatttaaggggtacaagtgatgttttgctacgtggatatattgtgtagtggttaagtctgggcttttagtgtaaccatcacttgaataatgcacattgtacctgttgaataatttcttatcccctacccccctctcactgtcccatgtgagtctccaatgtctattattacaaattctgtgtccatgtatacacattatttggcagtatttgactttctgagttgttttacttaacataatggcctccagttccatccatgttgctgctaatgacatgattttactcttttttttggctgaataatgctacattgtatgtacataccacattttctttatccagtcatccactgatggacacttaacgctgattttgcatctttgctattataaatagtgctgcgataagcatataagtgcacgaatctttttttatacactgatttcttttcctttggataggtacccaatagtgggattgctggattgaatggtagttctatttttaattctttgagaaatttccatactgttttccatagaggttatactaatttacattctcaccagcagtgtggactcttttctctacatcctcactaacatctgttattttttgactttttaataatagccattctgactgtcataagataatatcatgttatgattttaatttgcatttctttgataattagtaatgttgaacattttttcatatgctcattggccatttgtatatcttcttttgaaaaatgtctgtttatgtcctttgcccgctttttaatggggctagttggtttttctgttgtcattgagttgtttaaagatttctctttcttttcgtttccttttctattctcttttctttctctttttgagatgtagtctcactctgtcacctaggctggagtgcagtggcatgatctcagctcactgcaacctccacctgccgggttcaagcaattctcctgcctcggcctcccaggtagctggaactacagacacacaacaccatgcccagctaattttttgtatttttagtagagatggggtttcaccatgctggccaggctggtctcaaactcggtctcccaaagtgctgggattagaggcatgagccactgcttccagccagattcctctttcttaaaaggaaagtctaatgattttaatcacactaggaattagaagtttaaatgtaaaaataagatttaaaagatgcaatgtgtaaactatataaagcataaaaatgttatttctcagcctactaaaacagtaacaattatatatgcaggcaaggctggtcttttgctcttcagtggctttagttagtacttgcctaatacctgaaggtcacagggcatttgtaagcatgtaagagttttaatcatttgtactgtactttgataaagaagggttcagtgacttgccaggcttgcagaataggtttccaaatcctgaatataacagctagagaatctgatttataatatgttaattctccgacttgttttacttacaaattagtttgtaaaatgcctttctaaatgtatcttaaaggaagaattcagaattaggagctaaaactttattcaaagtcaccatgttgtaatcacaatattcacaaagcatatgtggttatttgtaccaaaaactctacctgattatccaaattggtgtagtgaacagttccaactccgctattttatagggcaatactctttgaaagtataaaccaaattcacatcttcaagttctagaatattaaaataagtgaatgctaaaagttttgataaatattcatagacttttatatactgagctgagtttagtatttcatggtatttcataaaaataggaaagtgggggtatgacattttaacagtttttgagttatatatagtatgagcttgcaaatatttgttattgcttcacaatttttgcagaaagagattaatttcatactagattggttctatagtgttcattgtagaaaagggaataaaattaatgtgcttaatcataaccaactaaatgtgatttctcaatcacttttcctagagtggtatctctgcccttcagttcactgggatggtgactttctaaagttgtctgcccgaatgttggcacccgtggcatcggaacattgtccatgggttttctggaacctagattcaaattttatcttgaagatacatgaatttctaatgtcagttaagaaaactagcaacatttgtgctacagaaaagataaataaatttattagccttcccgtcacttgtcaactgtgacttacaatcagtgtttgaaaggtcataatgttcattaatattaataagaacatcatagatattacctttcctccccttaaacctgtactctatagctgtttaaggaagttggaaaacttttcaaaacatagattgtaatcatagcatcatgatgttcggggaagtaaatggtaacatcctttaccattaaaattgcttttcagaataatctattggaaacaatattgtagtgtgcctcaggatatttattctttccactaactcatctttgtcaagaattattttacaaaggaaatttttgaataaacttttacttcctgcatgtctgtgttttctttttgcccctttccttcttgtagttaataaaatatttatatcaaaagctattatttcatatgtgatgacatattctaagaattggtaaacacagtcttaaatagattatccataggtatttgtttttgtcatattctctgtttttaagaaaacaatttaaattttgaggttacgactcaatgtttacttaaaaatggaaggataggaagctctcaggtagaaaagtattgacttttcaaagttttacattctgatttttaacatgtgcaacatgtttactcaaagatcccattgcaaagtgaaaaagaaagacactgagtttgaaactttatgcttagaagacgtatcatgacatgctttcctaagctatattattttaaagatttcttcattcattctgaggttaagccaataaagttaatttagcagaaaagagaagaattttatagaccttgacaatgcagcctgactgaacaactgctaattattaatagttttatttaaagtatttgcttaaatctgaatatatgataacatgggttagttaattccagaatgatggatagcaatgggatttgaaactggagtttaaaaatacattttcttatgttaagatgagtgaaaatctgttttgattgtcttttagtcagtaactgaaatgaaaatcatttttaaaaaaacaaacctatatcttattatctgcctttatctgtttagcaagtctaaatgtattaacatttatagtgtaaatattatgctattaacctatcgataataaaacattgcagtctttaaaataactttttattgaagtataataacagataaaagaaaatttgcaaatattaatgtagaacttaatgatttttcaaaaaatggacataacgaagtaaccagcacccagatttaaaaaagaacaaaaaggaacattatctgcatttcagaaaccctcttccccttcactgcccttttccagtaactacactctgaaaagtaatcactttcctgacttttaatgccatagtttagctttgcttgttttggaactttatgtatgtggaatcatacaatacgaactcttttctgtctaactttttttagtcatcattatgtttgtgagattcatccgtatcattgcatttaggcatagtttagttttccattctcccattctattgttgacggttatttgagttgtttctagtttccagaaggccattatgaatagtgctccgtgtgaatcttttgaactttcttgaacttgtcttttagttaacgtacctatgcacttctgtgagtacacatcaaggagtagaattgttgtgttaggatgcacatacattcagctttaatggatactgccaaacagccttccaaggtagcatgagcattaactttgagttgtttttattcaataaagatctttcttgtgatcaagggcaaggttttgttctgttttgttttgttttgttttgttttgttttgtttttaggtcgcagataatgggtcagataagagtccatgaatacgcaacaaaatgaaactcatttggtgattggaatgattgacctgatctctgaagttgcatacaggcagattgaaagctaagaactggacctaaaagcagagtccctttagtgcttttatgagagaagttactatgatggggaaaatccagcaaagtattttcagtcttacaaagagcaatgtagagacggtatgacatttgagttaggatattggactttttagtcaacctttcctagacagccttgttcaagttacttgacctatgtaaatctcattttctttgtttgtgtaatgagactaacaatacctgtctctcaggtttagtgtaagaattagatgagattatgatatcaagtacttaagtactctgcctactatacagtattcaattaataataacattgccctgcagtctgctccatccatctgtatagcccatttagttgcttcttaatttcttcaattatctaggtttctaatcaccttcccctccatcacccagtggttgagatgcttctttggtaaaagcaaaattttaagtgagtgaccttaatggaagcttaattctatttcctttttcagtagtgattcaaatactgctctaaaagtgttttttgcttctcctccacattctttcagaagacataaggaaaatactggtatttcttttagtcttcacagaataactgacagccggtgtttgaagttgactcttcccagatagttcaatttttagagtaccaaatatgttcagctttatatagtaacttggtattttcatgaaatttaaggaaatcgttgacccttcaaattagaatgtatcttctgcttctcttctcttctcaggatgttgaaaaaatgacagtactacattatttgattaaatatcaccaggtataattctctcaaagcagttttcagaagttgttatctgaagagtagattcattatttattacacaatattctccctccttatccccattctcccccacaaaaaactcatcagaatgagcttaatacaagcaagattaagactctgacataggggagctggcaagatggccaaataggaagagctctggtctgcagctcccaatgagaccaatgcagagggtgggtgatttctgcattttcaactgaggtacccggttcatctcactgggactggttagacagtgggtgcagcccatgaaggattaacagaagcagggtggggcatcacctcacctgggaagcacaaggggtcaaggaactccctcccctagctgagggaagctgtaaagtactctgccatgagggacagtgctatccagcccagatactacacttttcccatggtcttcgcaacctacagaccaggagattccctcgggtgcctgcaccaccagggccctgagtttcaagcataaaactgggcagtcgtttgggcagacaccaagctagctgcaggagtttttgtttgtttgttttgttttgttttgttttgtttttaccccagtggtgcctggaatgccagtgagacagaactgttcactcccctggaaagggggctgaagccagggagttgagtggtctgtctcagcagaacctacccccatggcatccaacaagctaagattcactggcttgaaattctcactgccagcacagcattctgaagtcaagctgggatgcttgagcttggtgtggggagaggtgctgccattactgaggcttgagtacgcagttttcccctcacagtgtaaacaaagcctccaggaaattcgaactagttgtggaacccaccgcagtgcagcaaagctgctgtagccatagcacctctctagattcatgctctctgggcagggcatctctgaaagaaaggcagcagccccagtcagaggcttatagataaaactcccatctccctgggacagagcacctgggggaaggggtggctgtgggcgcagcttcagcagacttaaacattccagcctgccagctctgaagagaacagtggatctcccagtacagtgctcgagctctgctaagggacagacagcctcctcaagtggatccctgatacctatgccacctgactgggagacacctctgaagaggggttgacagataactcatacagaagagctctggctggcatctggcaggtgcccctctctgatgaagcttccagaggaaggaacagacagcgatctttgctgttttgaagcctctgctggtgatatacccaggcaaacaggttctgcagtggacctccagcaaactccagcagacctgcaaaaagggccctgactattagaaggaaaactagcaaacagaaagcaatagtatcaacatcaacaaaaaggacacccatgcaaaaatcccatctgaaggtcaccaacatcaaagaccaaagatagataaatccatgaagatgaggaaaagccagcgcaaaaaggctgaaaattccaaaaaccagaatgcctcttctccaaaggatcacagctccttgccagcaagagaatagaactggatggagaatgagtttgtcgaattgacataagtaggcttcagaagattggtaataacaaactcctctgagctaaagacacagtgcaagggagccaaaaaccttgataaaaggttacagaaactgctaactagaataactagtttagagaagaacataaatgacctgatggagctgaaaaacacagcacgagaacttcgtgaagcatacacaagtatcaatagccaaattgatcaagtggaagaaaggatatcagcgattgaagatcaacttaatgaaataaaacaggaagacaagattagagaacaaagaatgaaaaggaagaaacaaagcctccaagaaatatgggactgggaaaagaccaaacctacgtttgactggtgtacctgaaagtgatggggagaatggaaccaagttggaaaacacacttcaggatattatccaggagaacttctccaacctagcaagacaggccaatattcaaattcaggaaatacagagaacaccacagagatactattcctttgtggaaccccacaaagaacaaccacaagacagataatcatcagattcaccaatgttgaaatgaaggaaaaaatgttaagggaagccagagagaaaggtcgggttactcacaaagggaagcccatcagactaacagtggatctctctgcagaaaccctgcaagctagaagagagtgggggccaatttttaacattcttaaagaaaataattttcaaccagaatttcatatccagccaaactaagcttcataagtgaaggagaaataaaatcctttacagacaagcaaatgctgagggattttgtcaccaccaggcctgccttacaagagctcttgaaggaagcactaaatatggaaagaccagtaccagccactgcaaaaacaaaacaaattgtaaagaccatcaacactatgaagatactgcatcaactaatggacaaaataaccagctagcatcatatgacagtatcaaattcacacataacaaaattaaccttaaatgtaaataggctaaataccccaattaaaagacagactggcaaattggataaagagtcaagacccattggtgtgctgtggagcagggggcggtgctcatcggggaggctcaggctgcgcaggagcccacggtggcggggaggctcaggcatggcgggctgcaggtcccaagccctgccccacagggaggcagctaaagcccggcgagaagtcgagcacagcagctgctggcccaaacacagcttagcagtgctaagcccctcactgtctggggccggcagggccagctggccgctgtgagtgcggggcctgccgagcccacgcccacccggaactcacgctggcccgcaagtgccatgtacagccccggttcccacctgcgcctctccctccacacctccctgcaagctgagggagccagctccagccttggccagcccaggaaggggctcccacagtgcagcggtgggctgaagggctcctcaagtgccgccaaagtgggagcccaggcagaggaggcactgagagtgagtgagggctgccggcacgctgtcacctctcagagggagaggcgtgggtgggaaccgaggctgcgcacagtgcttgcgggccagaacgagttccaggtgggcgcgggcttggcggaccccgcactcggagcggctggcctgcgctgctggccctgggcagtgaggtgcttcgcacccgggccagcagctgtggagggtgcaccagtcccccagcactgctggcccacccgcaccacgctcgaattctcgccaggccttagctgcctccccatagggcagggttcgggacctgcagcctgccgtgcccgagtgccccctggcactcctgccctccacgggctcccgcacgcccgagcctccctgactggcactgccccctactccgggggcctggtcacaccaaccgcccaagggctgaggagtgtgggcacatggcatgggactggtgggtacctccacccatggccctggcacaggatccactaggcgaagccagctgagcttctgagtcgggtgggaacttggagaacttttatgtttagctagaggattgtaaatgcaccagtcagcactgtgtctagctcaaggtttgtaaacacaccaatcagtgctctgtgtctagataatctagtggggacttggagaacttttgtgtctagctaaaggattgtatatgcaccagtcagcactttgtgtctagctcaaggtttgtaaacacgccagtcagcaccctgtcaaaacggaccaatcggctctctgtaaaatggaccaatcagctgtctgtaaaacggaccaatcagctctctgtaaaacagaccaatcagcaggatgtgggtggggccagataagagaataaaagcaggctgcccgagcagtcaccttccggactgtggaagctttgttcttttgctctttgcagtaaattttgttgctgctcagtctttgggtccgcactgcctttatgagctgtaagactcactgcgaaggtctgcagcttcactcctgaagctagtgagaccacgaacccactgggagggacgaacaactccagacgcgccacctttaagaactgtaacactcaccgcgaaggtctgcagcttcacttctgaagccagcgagaccacgaacccaccataaggaagaaactccagacacatctgaacatctgaaggagcaaactgtggacacaccatctttaagaactgtaacactcactgtgagagtctgcggcttcattcttgaagtcagcgagaccaagaacccaccaattccggacacagtggttttcccctgcagtcaggctgcccagcagtagctactttctctaagaagttttccctgatcacccgttcttaaatggatatatccttttcctttctctcttagcaccccgtggttggtgtttatttattgacttacttacttactcctccaacctccccagccaaactttgcgtcattccatcagtcagtggcctgctggtgtctgccagtgcttgctggtgtgctcttctgctggtgtgtgttcctcccaacgtccagccgcttgtgtctgtgcccccagggtcttggggattttatagacacaagatgggggcatggcggaccagggtggtcttgggaaatgcaatatttggggacgaaaacagaaatgcctctcctgatttaggtccaatggcacaggcccagaggtggagccctcaccaggagccccacccttctgctcccagcacttccttgcccccatactatatcattaagacatacattgaagtgctatgtatctcacttctagaagtaaaacaatgtcaatgagattagaagctttatatatacctcttcctgactacatcttctttggtcttcctcaggagaaccattatgaagaatttagtgttaatcattcccatgcatgtctgttttttttactacatatgtatgtatctctggacaatttataattgagaatatttgaaaaatattattgcagtctgatatggttttgatatttgtcccttccagatctcatgttgaagtgtaatctccattgctggaggtgaggccttgtgggaggtattggatgatgggggcagatctttcatgaatggtttagcaccatccccttggcaatgagtgagttcttattctgagttcatgggagatatggttgtttagaagactgtggcacctttccctcaaaccctgctctcgtttactctctcactgtatgatgtgctggctcgcccttgtccttccactgtgatagtaagcttcctgaggccctcaccagcagcagatgctggcactatgctttgtgtacagcctgaagaactgtaagccaaaataaaacctcttttgtttataaattacccagcttcaggtgttcctttatagcaaagcatgaaccagactaacacacactcactagtttatcaagtctacctccaaaataggtcttgaacctttattctttctccaagtcagcattatctcctattcagtaacttcctatctgttcttcccacttgtcttcctgtcatttttttcccattattctccatagcatccagagaggattttgtaaaacacataaccgattacactcctctactgaaaacccttctgtggtttcccactaaataaaactcacattgtttcatttggcctgcagttattcccttccttcctccccagtggtatccaaaggtcagcctttttcctgctctttgtagtggaacactggtcttcttttagtttctggaacattgaaaacatttgtatattttttaggacagcagggatgttaatttaaaaaaaaaaagaaaaacattttttcctctttgtgcttggaatgaactactcactctaccttgctagctacttcctctaagaaattttccctgatcacccattcttaaatggatacatccttttcctttctctcttagcaccctgtggttggtgttttatttattgacttactttgtattgcttttaaaatgcctatttcccccaccagattataaatttctgaaaggaagagctatgtcttttttgtgtgcagctgaatacctagtatctaactttacatatggtagacatactcaaagtatctgttgaaggaaaataggaatgaagaagtaacggacataattatttttatcatcttcatttaaattctacaggctgaaaaataactttgctcttgagttttaagaggaaaaaataagttgttttagtttagatattttaagaaacagaaacctagacatagtagctccagtacagtgggggtttattgtaaagatagaggaaatccaggagaagttgagcaagtagacttcaggaaggacaggcaccaaagttaacctagacactcgtctgtattattctctatcaatctctatgaatcagattttctcccctctttcctgacctacctctttgtagctttgttttttttacagggcctaaaagatctctaagtatttctagtgtgtgtgtaatttaagactaaaattcttaatgttgactgcattgaaagtagacatttgataaatgtaatattaagtaaaattctgatgcatctcaagacaagctatatattagcttggcataggaatttaattagagtggagcatagcatagttttaatatagggcgtaatctttaaaattataatttggtcctcagggttgaagtggtagctggatccaaatcattttcatagtatacatttgcaggtgaggttataagtaaaagcagtgtgcaattttgacccatataaataattttaatgattattggcaaaagtatatgaaatatttgaatgcttcccattgtctagaaactgtattgggaaagcatcttctaagtaataagtgttgaaagacctccattgtaattattagtaacaacattctttcaatttataaattatctatattgtacaaaagagaaggaactcatgcagtatcagtggaagtggattaaaaatgagacctttcattgaagagtagttatttccctttaccaccttgtttcataaatatccaattttagctgataaactttcagacttactgtttaagtctcaaatatttgaggacagaatactggcaggctttactggagagtatttctgggccacacactgtactaaaagatttacataccttgtcacactattcttaccttctccaaacagactgcagcccttcacacccctcatacagttgcccaatttagaaataggtttttcaacttttttcaattcacatgggcagacgctgtgattatccttgtccttcatgtcccttagtaaataacagatggtctttgtctcttttaagaaatcctcattacctactctcattttaagacagaaatagtaatcaattcccaatatcattttgggtctttcagtccaagacttgactctgttgatctcatatcccaggtcctcctatggtctggcaagacttctccatgttaaattccttcacctgatgctcctggtattcttttccagctgcacttttcaggcacagttttccattggtatccacagggtttaaagttcccctcatcccccacagataccaaaatctgaggatgctcaagttccctgtataaaatggcataatatttgcatataacctaacacatccttccatatgctttacatcatctctagataacttataatacataatacattgtaaatggtatgtgaatagttgttatttgtttttaagtttacgttatttttattgttattatttttattttaaagatttttccatctgcagttttccatctgttgtttgaatccacatatgcagaatccaccgatagggagggcaactgaacttaattatctgcatccattgtttggcatttagtagtagtagtatttttagagacagggtcttgttgtgttgccgagagtagagtgcagtggctattcacagacattatcatcatagtggcgcactacagccttgaaatcctgggctcaggtgagcctcctacctcagtctcccaagtagctgggactgcaggtatgcgccactgtacccagctgtttggcatttttaaccaaagagtagtttaacctttttcttatttatccagggcttcttaaccatatctaaacatacaatatttagctaccagtactagaactgttgtttgcatttgttaaaaaagaggcataataggaccttctggtctcctactttttgggttgtctcaccgggactttcagaggctcttattttttatttttttctttcgatacctttggtatgaaagctgttattttttagaagtccacttgacattttgcttcttgtcctcatcctagtagtatagcccattttgctcttcttaggaatatgccagaaaatttttcataattgaataaaacaatttcctgctggtcctctggctcattgacctattggatttcagcttggaccacatcatgtctggtaattatttcttaaggcacttaaagcacctggtagtttgtttacttacttacttcgtgtagttgttctcctaacatcccaatgaagtaggtacaccctactttgtagactctaaagattcttggttatgctcattggcaggcaagaatccattttatccataagaatccttaatacagagaagaattagtgcattcttagtgtttatcatctctgttaccttgcaaatatacataaaagatccctcgttaatattaacatatgaattttaggccaggtgcagtggctcaggcctgtaattccagcattttgggaggctgaggtgggatgatcatttgaaatcaggaggctgagaccagcctgatcaacgtggcgagaccctgtgtctatcaaaagttaaaaaatttaggtaggcatgctgggcacaactgtactcccagttactcaggaggctgaggcagaggatcgcttgagcccaggagtttgaggctacagtgagctatgatagcgccactgtactccagcctgggcaacagaacgagattcctgtctcaaaaacaaacaaatgtatgactgtaaaagaatgaaagataaatatccaatagtactgattaaacctctcgtttaagtgcccttttttgttcccgttaaatagaatcaaagcacattttatctaataatgtataagctttcagcctgaaaaacagcttaaaataagtgactaaggttgaagctaatatgagtcaaccttaaaacatgcaaaatttttacaaaaaacaggtcacctttagatgccaggtattactttgcctattcaccaatctagatgtattatctaattcttgtcttagaccttacatttttttccaaaatcagtatagttgctttctgtttgtctggtggtgaaccgcatgataactttacaagtactgctggttctatgagagtctttttcttactatcagaagagcatggtaacagtccaatactaaaagaaaaaggaagtacgttagttgattataccagtgaatcttgaagaacatatcaagtaattcttttctccaaacttcaaactgttatagttcacacggaactaatcttgggtagggaggcagatggggtgggcttcctctgtctgctgcttcctgtcccagttgctcctcaacagtaacacctgagtcttcttagccacctttctcagtacctcaggaaacctctgtgaagctttctttctccttacttattcctccagactctgttgtcttcttctttcattcttctgttgtcttcttattttattcttttgccctgtggtcttccttccttttaggtttttggtttgagttttggttattcaatctcacctaatttcacctgggaaaatttttgagatccaatcaggttgaagaagaaagggaaagaaaaccacttagcactagtccctcaggatctaccgtatataagccaaacagacattctcctctgccagaatgctcatctgttggcataactttgttcctaagaatctctacctcacttctctgcttagagttgtattataaaagacccccttctattatcctgggtcaataagtgcacaagctcaaaaggaaaagaagggatgtgctgtgccccaagaaaggatgatagaggaagaaaaatcctgtcctggctcgtctgatgtctcagttggatattacccaattcttaatgtttaataagcccatttatttttgaggcccttggcatcatttgtcatcgtgtactattttaatggcaataaaacgttcctccagctgtatcaggctgagtgtaaggatggtggagacccaaagcagtttacatgaaaccctccatgggaaggagaggagagaaattcaggatgaaactacagccacagccagaatggtggactgaagtaccagtgttccctcagatgggggaactcctttatagtgtggtaggttttcttttcttttccttttttttttttttttttgagacagagtttcgctcttgttgcccaggctggagtgcaatggtgccatctcggctcaccacaacctctgcttcccagcttcaagctattctccttcctcagcctcccgagtagctgggattacaggcatgtgctactatgcctggatatttctgtatttttagtagagatggggtttctccatgttggtcaggctggtctcaaacttctaacctcaggttatcctcccgcctcagcttcccaaagtgctgggattacaggcgtgagccaccgcacccggcctatagtatggtaggttttctgaggccttctttataccagtattaaaaatgaatttttaaaattgtgccagaattaagattttttatctatttttctccaagaattattagccactttaaaagatatctttaataattaaagataaaattggattttatttgaaaagtactgataaacctgaattacatgttacgtaatatattaactgtcttcctatcttcaaccttcaaatctataatagactcgatatcaaatagtactttgaacccagtagagtttcacaacctttcaagtgtagaaccaatcagtcaacaagcatctattaaatctctctaagttcaagaaaagatcctttaatttaatctagcatttggataaaacccttgaaaaaattggttgttggttacactttttctacttttccttaatggggctacttaaagatttatttaggtcagatatggccaactcaaatgcacaaaaatgagtgaaatgtgctaggtataagacaagatggagtattgaggactgggatgaactgcagagtacatattcacgtaaaggaactcaaattcaatttttataaaaagctgaggccaaatagagtgtatcatcagtccaaattcagccaaaggctgcagtttgtgacctctgatttagatagcaagatgaaatattatttggttgggatttttggaggtggtaggagtgactccaaatcataataaattaatatatatgtactttagaagcccatattgcaagacttgtatttatgatggctataatatatattgataaaagagtaagtataattatgcctagaagcataagacagtatttctcaaagtgtagttcatagcaactttcactagaataatttgggaggggtgggagagggactatttcaaaacttactacaaagctatagtaatcaaaactgcatggtaatggcataggtgtaaatctatagattaacagaatggaaatacactcacgtatttgtgggcatttgattttcaacaaggatgccaagacaatttagtaaggaatgaatggccttttcaacaaatgttgctgaggtaactggagatagctagctagctagatgtagatagatagatagatagatagatagatagatagatagatagacagacagatagttggtttttttttttttgagacagggtctggctctgttgcccaggctggagtgcagtggcacgatctcagctcactgcaacctctgcctacctctgcctccagagctcaagcactcctcccacctcagcttcctgagtggctgggactacaggtgcatgccactatgggcctggctaattttttaattttttgtagagacagggttttgccatgttgcccaggctggtctcaaactcctgagctcaagtaatccgcccacctcagcctcccagagtactaggattacaggcttgagccaccggtcccggctggtaactggatattgacttataaaagaatgaagttgcacccctacttcacacccctctctccatataaaagaatgaagttgtacccctacctctatggcaaatccatagagatagaaagtagattagtttcctagagttgaagagaggagggattgacgagtgagtgcttacaggaaaaagttttcttttggagatgatgcaatgttcaggaattaggtagtgatgatggttgtacagccttgcaaatatactaaaaaccaactgaactgtacatttttgaagaacaaattttatggtgtttgaattacatctcaatgtaacaaaataacttgaagcaggagagattgctcattaaagataaaaattctagaggtcatcttagactcaagcttctttgagaatatggctctagaaatctacaagtttaacaaatatactcaggtttatttcctaatgactaggaaatactgatttaacagttgtgtatacttgtacattgaaatgtgtttaggctaaaggacatgtgctttttgatcattttaatcatcagcagcaaagagttatgtggtattactttctgtcccatatgagagttatcagatgataaaggtgtgatgctttctctggaggaacaagaagacggccatacatagaagcatgaaatggtgtactttttcatttctttgaatttgttactttggcaaattctgggaagaaagataataattcaacgtaatgaattcagagaagcacaaaacttaagggaaatatccagcaatatttctgtggttgctttgtttttagtgtttattttggggatgaaaaccttggtgtgttgatttttctcaaggctttcttggtcatgtgttactgtgggcctttcaacaaagccaagttgacagagaacagatgcatattttaataactaaacttcctcagcaatagtatctggatcagattggtttcacagcagtgttgcagcaggataaattataattaaaaataggcaggtattttatttcatgaagatttaggggaagaacaagatggaactttttagagttagcagttaccaaataggggaatgaaggtagatctgcaatttcccagtacaaagtatttgggggcttattcagagttttacttgcactgagttgataaatggtatatgatcatcagtagtatcctataaatattaaactgtaagtctcttttgaaaatctaaaattactcctttttctaaattatcaaaggttttaaaacatcaaattcacaaataccttttttatttaaagagaaagtaggatttgatactcaatttttttgttgttgttgagacggagtcttgctctgtgtccaggctggagtgcaatggcgccatctcagcccactgcaccctctgaatccctggttcaagcgattcttctgccacagcctccctagtagttgggattacaggcatgcgccaccatgcccagctaatttttgtatttttagtagagatggggtttcaccatgttggccaggatggtccccatctcctgaccttatgatccacccgccccacccacaaagtgctgtgattataggtgtgagccaccgcgcctggccgatactcaatttttttatggttgatgccagtcacacttactttggctaatcctgtttctttaacgataaaaatagatgatgaagcttaaaagattctacacttacacgaatggtatattatattgttttgttatatgtaagatgtacgaaaagtactttgtttaattagggtctcggaacatgaatatgactagcttttcccatttttccttttttatcgcaagcttctttttttttttgagacggagtttcactcttgttgcccaggctggagtgcagtggtgcaatctcggctcactgcaacctctgtctcctgggttcaagcgattcccctgcctcagcctcccaagtggctgggattacaggcgcccaccaccacgtctggctaattttttatatttttagtagagatggggtttcatcatgttgtccaggctggtcgtgagctcctgacctcaggtgatctacctgcctcagcctcccaaagtactgggattacaggtgtgagccactgcacctggcctttatctcaagcttctaccagtagtgataaatggctagcaagaatcttctatgccttagcctgaaggagatgggttccattaccaatcttctttcttccaaaatatagaacttcaggtatttgcccgaggctgcaccctcagccaatattttggctctattttggcctcagccaatatgttgtgctctatattaggcaagtcacagtacatgatggagacacagaactgatgaacattttcaaaaggaggcatgctggagtgattcaatacaaataagatagacagactcttgcattatgttgacccataggaatttgctgggtttttttgtttgtttttgagaaggagttttcgctcttgttgcccaggctggagtgcaatggtgcaatctcagcccactgcaatctccacctcctgggttccagtgattctcctgcctcagcctcccaagtagctgggattacaggtgtccaccaccacgcctggctcatttttgtatttttagtagaaacagggtttcaccatgttggccaggctggtctcgaactcctgacttcaggtgatccacccacctcagcctcccaaagtgctgggattacaggcatgagccactgtgcccgtccaaaatttttgtaagtcaaaattttttgaatattggcagtttcctgtggtgcatcctaatattatactgagagtagtgatatgttggagataaggtcgtaagaacaggtaatacctaatctaaactgggagaataactactgttcaatcccactattgggccatagtagtcactgtttatataataaatgagtgaagtcttctgtgatgtcttttcgacacatgtattcagtgtgtattatgtatctagtagtctcccaatctcaaagcttctttgaagttgcatatcatatatttaaaatacatgtaaaatttgcagtttgctgcacaatagagccatagttgtcttagtacaaatatttttttcacatgtttaagtaaaacttgtccaaagagatatagcatatttgccttgtttttcccttttcttacacacagctctttgtacctcaggggtttgtcataccataatttgggatgcattgttatataaataggaggccactgaaagtttaaatcaaggtaatgccatggtgaaattgatgtttgagaaaagtaattctgagagagtcaaaatagttgtgttgtgatagcaactggcatatgtgcattaaaaattgaacattaagaataaatgctgacattgtggattatttgttgctttcataagtttgtcctctagcacttgtgctttttatcttttgtattaagtatgcattttaagagtaaatggtataccaccaaattgtctaacagtgctacatttttgtggaatcttgggggagggatcatatatagttaaaattttatattagattttcttttatagccatttacatgatgtggctttttatatttggaggacaaaagaattcatagaatacattaatgtgttacatgatgtcagcagataactagatttctaaaggttaagttattaaaggcttatatggaaatctaaaaagactcatgagtaattacttttaaaggcattgaaaggagtgaaaaagtgggtgactatctaattccagacatgaatatgagacagactagtacttatagcagtttggaggatgccagagaagccaaaaagggagcagcatatgcttccaaattgttttgaagtgaggctttgtcttttctctagaaaaatagataatatctcatcaacttaacatctagaggaccagagatattcactgaaaggaatgctttttattcattcaattattcattcatttattaaatattgaacactttaatgtgctgacactgaaatagtcctaacataacatatggttaatagaacagacgttgtctttgcatctatagtgctaatacactaatgggcagataataaatacaaaaaatatatatgactatatattataataaatgttatgaagggaaactacaagttacttcaagatttggtaacaaggaaatctattttagattagggtttcaagaatggtctctctgagtaagtgacatttaaagctgagatctaagagacgagtaggagaaatcacggtgatgagtaggggaagtgcatgcttgaggctcttgggtggcaggttctaaaagaaagccagactttctagaacacaagagcagttggccaagaggtaggtaggacccaaattataccagagcttggtggccatattgaggaggacatgggatttcattctaactgcaggaaaaagccattgaagatctttaagcatggaattggatggagtgacttaagtgtttcagagatgactatggctgttgtgaatgcattgaaggggataaggagaccagggaaaccagttaggagctactgctcgggtaagagttgatggtggttagttgaatgtatcagcaatgaacttgcaattgaaggtcaaagctaactttaaattaaactcttaagaatattattggtggtgtgtctcccaagaaaaatacctgtctaagaaaataggaaacatcatccccaaaagactaaatacgtagtgtgaaggttgagaaagaggaatatattgcagggaaacttttggtgaggtttatttgttgttgttgtttacttccaaaatatggtttccatttttctcccccataagttttctatttgggaaaagagatttagtggaattataaactgaaagaattcatgtataacttttgcctcactttactttttattttcatttttaatctttcatttttttccttctataactttcttgtctttgaaaaaaagagtgcaggtgccttatgtgtccaagaatgaaatagcctctgaagtactatctgtttgcttgctagcttgctggcttgctgggtcaaagaaaaggaagggctcgtttatactgtaacagtgtttttatttagcatgcctctgaggtttttattgtgttctgggacagtgtttatgacattggaagttaaagaaaagaattgcaatgagttggggggatgggggagggatagcactgggagatatacctaatgctaaatgacgagttaatgggtgcaacacaccaacatggcacatgtatacatatgtaacaaacctgcacattgtgcgcatgtaccctgaaacttaaagtataataataataaaattaaaaataaatatatttaaaacaaacaaacaaaagaattgcagtgagtttgagtgacacaaaaataaaattcccatgataattcaataccatgaattatctttattgagtgaaataaattctgagggtatagtaattattttatggtccttttgtattagatttgtgtttgcttaataatttagcactttgaattttctctttgaatttttattcttccagaaatctttgcggggttggagttttcatattgtgacttttgggctaacatctctctagctcttcttattagttaattttcagcagattttttttttctatattgcccagtccagtctcaaagtcctgggtttatgcaatcctctctccacagcctcccaagtgactcactgggattacaggtgtatgccaccatgcccagccttggaagactttttataaattagggtacatcttttttttttatttttcacataattttgtttttgttatcagcaaggttgaatcaaaagtaacttcctttcctggtggtctaattgctaggataaagagagggaaaaaaataacttcatcattactgaattatcaaaatgaggtcttttaatttatctattactattataaggctagttagaaaatttaagtcattttctaagagatagaaattttgttagcttgatttttctgactttttgtcattccttctcttatgtatggtgccatctgctgtttgtgggaagtattttatattttgaagcactacacataatagaaatacagtgtctaaaagaaaaatgtcaaaatacatgaaatgaaaaaagcagtagtgtggcccgtttgaaactttgtggcctgtggcttgtttctttttatgtaaaaattatttttatatctgattatttttagtacttacatgaatcacaagattttggtactcatcgtgttctgtcttaattttgtttttgctcagaatagaagtaatcggtaaacatttgttagttgactcatttggtttgttttttgtgactcctcaggcacctttcttgtaagcttctgcttacagtctatgcaaccttaggcaaataatttcagcccttagcacctctgtttccttctccataagaagaagataataatatcaatttcttaaggtttttctgaggattaaatgagataacacttgtcatatgcatagcacaatcctttcctttcgctaaaatgttgtttccaggttcagtgagtttcccttttaccttatttcaaagacacctttgttaagaatcagatttcattgctataggatcataaactctttgagccagaaggaacttcagtaagtgggcctcaaaatgttagcatgcatttgaatcatatggtgatcctatttaaatgctgattcggattttattggtggttataggatatggaacctcatagtctgcacatctaacttttacttaagcattgctgatactgcccccacagaatgccttttctgtagcaaagctttggaaaacaacaaacagaaaaacaactagtaaagatggagatggatgggaagaggatgactgaaaggtataaaattacaattagaaagaaagaacaagttctggtattctattgcatggtagggtgactatagtcaacaataagttattgtatatcttaaaatgacaagaataaaaggttctgtgtcttcacaccacaaaaaaatgacaaatgtttcaggtgatggatatgctgattagcctgattttaacattacacaatgtatatgttttgaaacatcacattgtaagcaataatatgcacaattattatgtgttacttaaaataaatttttttaaaaaacaaaagaaaaataatccaccaaaatctgattttcttttttgggtaatctcatgtgccagtcatcagaactgtatttctttgtagaagaggaaaggaatccagagtctgtctccagaagacattccagactaatttcttattctttactctcagcactaaattttattagtcagcagttacattttgtcatttctaccaatgttatacagcagtaacattgctgagagaaattattaaagagaattatattcaaaacccagttatttattgtccaagcattatgacctacaaatatttaattggtatccatttaaaattcaactacaacttttatttctatttgtaacttgttgccttgttctttactctttaaattgctttaaatttttacagcattaaaaaatgaaaagctaaacaaattagcaacttcagtaacgtttcaggttacaaaatcaatgtacaataatcagtaacatttgtatacaccagtaatgttcaagctcggagccaaataaagaatgcagtcccctttacaatagccacacacacaaaatgcctaggaatacatctaaccaaggaagtgaaagatctctacaaggagaaccacaaaatgctgctaaaagaaatcacagatgacacaaacaaatgaaaaaacatttcttgttcatggattggaagaatcggtatcattaatatggccatactgtgcaaagtaacctacagatacaatgctattcctatcaaactaccagtgtctttttttttttttttttttttgagatggagtctcactgtgttgcccaggctggagtgcggtggtgtgatctcagcttactgcaccctcccaggctggagtgcagtggtacgatctcggctcactgcaacctctgcctcccaggttcaagagattctcctgactcagcttcctgagtagctgggactacaggcgcaagccaccatgcccagttgattttttatttttagtagagacagggtttcaccacattggccaggttggtctcgagctcctgacctcaggtgatccaccctcctcagcctcccaaaatactgggattacaggagtgagccaccgtgcctggccaccagtgtcatttttgacagaactaaataaaactattcaaaaaattcgtatggacccaaaagagcccaaatagccaaagcaatccaaagcaaaaagaacaaagctggaggcgtcacattacctgtcttcaaatatactgtaaggctatatagtaatcaaaacaacgtggtactggtacaaaaatagacacatagaccaaaggaacagaatagagaacccagaaataaagatgcacacttacaactatctgatctttgacaaagtcgacaaaattcagcaatggagaaaggactccctattcaataaatgatgctgggatagttggcgagccatatgcaaaagaatgaaactggacccctacctgtcaccatatacaaaaattaactcaagaaggattaaagatttaaatgtgacatcacaaactataagaatcctagaagaaaatctaggaaacaccattctggacatcagccttgggaaagaatttatgactaagtcctcaaaagcaattgcaacaaaaacaaaaaattgacaagtggaacctaattaaagagcctctgcacagcaaaagaaattatcaacagagcagacaacctacagaatgggagatgatatttgcaaagcatgcatctgacaaaagtctaatacatagaatctataaggaacttaaacagttgaacaagcaaaaaacaaataaccccatttaaaaaatggacaaaggacacgaacagacacttctcaaaagaagacatacaagcagccaaaagacatgaaaaaatgctccatatcactaatcatcagagaaattcaaatcaaaaccacaatgagaccatctcacacccatcaacatggctattattaaaaagtaaaaataaataacagatgctggtgatgctgtggagaaaaggaaacacttatacactgttggtgggaatgtaaattcagttcagccactatggaaagagcttggcgatttctcaaagaacttaaaacagaactaccatttgacccagcaatcccattactggatgtatatttaaaagaaaacaaataaaaagacatacacttacatgttaattgcagcactatttgcaaaaacatggaatcaatccaggtgcctatcagtggtgaattggataaagaaaatatggtacacatataccacaggatactttgcagccacaaaaaagaacaaaatcatgtcgcttaaagcaacatggatgcagctggaggccattatcctaagtgaattaatacgagaacagaaagcccaatgcctcatatttgcacttgtaagtgggtgctaaacattgactactcagggacataaagatagcaacaatagacactggaacaactctagactaatagaggaggggaggaaaagggtgggaacaagggttgacaagctaactgttggatactatgctcagtacctgggtgatgggatcattcataccccaaacttcagcattatgcaatatagccatgtaaccgacctgcatatgtatcccctgaatctaaaataaaagtcggaaaaaaccccaaacaaattagccccaataactctctgtaaattctagagtaattacttgactccaataagacctttttttggtgagttggatatacaatgctattctcttgatgtttggattttccccgaaactggttaattatgtttaaaactgaatacccttaagtccagtgccccagtgtgggttcaacaggataaagtgtctatccacagtattctctgagaaggaatcctttagttttagccagagagtcatagagttgttcacacctgaggaatcatccagcttagttacacaagttcaaggtcctaaaggaaattaaaagaggcataaaatgacttctcagaaatgtatagattgactaaaaagtaaaaattgtggcctagaaaaaaaacttaatgagtagaaagttttttccaaatgaaatcttatgtataaggacaatactaccctttcttcctacctcccctgaagtgatggtaaggagtatcttgctattttatttttattttttgaaagagcatctcgctctgttgcccaggctggagtacagtggtgtgatctctgctcactgcaacctctgcctcctgggttcaagctattctcctgcctcagcttccccagtagctggtattacaggtacacaccagcatgcccacctgttttgtatttttattagagaaggggtttcaccatgttggccaggctggtctcgaactctgacctcaagagatctacccgcctcggcctcccaaagtgctgggaatacaagcgtgagccaccgcacccagccagtatcttgattttatctggtgtagcccagtgcattcacaagcattgctgtaagactacacaaatgtcatgaaagctactaggatttgtatggacaggttgcactatcatcctgtctggatacttgtcatgtttaagatttctagaaaaggaacttacccagtgtactttgataactttttcttgatttttaattcttttgcttttacatctgtgaaaaatagatcattataatacttttgaggtattttttttctagtggataatctgaatgcaaaatcaaccaacaaaagaaacaaacaaaaaaaccctgttataccctggaactccaacttgagaattttcttttccttgccattcctggcttccatcttcacagtcattcgtagactcaccctctctttaactttgcaagatctctggcaattattccagtcctaaaaggctagattctataggcatattctgtaaatgcttcttggttttcagactgtgtcatggtaatgctgttgccttccttgctacatcttctgagaactagaacttaaggacttccatgtctctgtacacttattcaatctgttcttattttaaaatcagaaaaaacaagggactatgtttctactatattcaaatcataaagaattatgggctgggcgtggtggttcacacctgtaatcccagcactttgggaggccaaggcagatggatcacaaggtcaagagattgagaccatcctggccaacatggtgaaaccctgtgtctattaaaagtacaaaaaattagctgggtgttgtggcgcgtgcctgtagtcccagcttgggaggctgaggcaggagaatcacttggacctggaaggtggaggttgcagtgagccgagattgcgccactgcattccagcctggcgacagagtgagaccccatcccccccaaaaaaaaaaaacatggattgttagacttgaaagtaactctacaggtagtttaagccaataccccttatttaaaagaagagaacttaagtatgacagtaaaagttgtaagaaccatgactgatctcaagcttaaagccggagcagatagtttagcttagcattagggcttaaagttaatactctaagtagattaggtaattctttaatagtagactgtggtatttggacctatgctacagaattctgtctagttttattttttagatgatttataagagtcttgaagatagtttataggtgaacaaacgaatttaaaattagtacgcatgagaacacatcaaaggaattaagaatatttccttaaaaaggataccttcaaaggcatcttcagtaacatgaaaaattcaaccaagtgttctctactctatttttttttaggatagtacaaaggaagtaaaggcataatatagtaaaaagaacagcagcagttaggtgtgaggcaaatccacacaatgaagctggtgaacactagaacaggagggatatttgccttcctggttattttcctcaaattctctgcttattatcaatatctgtttactgtggttgggatttagcatccaaaggcacgaatggatgcacttcccaagactctgtcctgtttagtgatatttcatggtctatttaataaactgtttgggggactttaacatgataattgtcagggcatatagtgcttaactgtgtgtcagacacttttctaagtgtttttttatatagtaactcatttaattctgaaaaaaaaaccctctgaggtatctataaggaaatcgaggtagagagagttaaaataactctaagtcatatagttaggaggagatgcaaagttgattcagacctaggaaggctggctccgagtctgtctcataaccaccatgctttattgcctctccaaaaaagaataaaaggaggaagcggtcagacttcaagggaaataaaatttcttttattttacctagatatctctagatccgataacagctgggaccaagatatggcaggctgcaggggtcaaggagagccagcaagcagtgaaacatctgcctccctctccagcttcatccctcacatgcactttcgtggtcccatccctcccagatcacaggcagttctgcctgcttcgtttctctctgcctttacagatgctatgcttttggtttgcactgctttcctcccaatactttaacttgaccaatttgtatttatttctctacctctttcaggcaaaactgctttgtaagcatctactgcattgtgaaacatttccaagtttacccaagaagtactgatctttctacctttgggctccccctgtcccctaaatatccctcctttttttgtactttcatcactcatttgacaactatttatttagcattactatgtgccaagcactattctggacactgaggaaatcagtcagtccaaatttctgacctaataaaacataatatctaagtggggaagaaaagcaagatttggaagagaaatgataggatttgatgtctcccttaaagggatcactccggctactgtcactctagagaaaaggagtcactctggagaataggctgtggggggtcaagagcaggagtgaggagaccaggaaactgttgtgttaatccagatcaggaggtgatgatggcttaggtaagggtgggagcagtgggaatggtaggaagtagttgaatttgggatatgtttaccaagtagatccaaaaagatttgctgatggtttaactgttcgttgtgagagaaagaaaggataattctatgattttttgcttatgcaactagaggaatgcacttaccattgaagaagagattggaggaagaacaggtttatggggaaaataaggaattcagatttttacatgtttttgattcctattaggacatccaagtagagatcttaagatagttgaatatatgattctggagttcagaggagatagtgaggctaaaacgttgatttgggagttattagtgtatgctatgtatttaaagccacaagacttgatggggtcacctagaaagctagctgacgaccaggtatgaccatagggaactcgggagatggtagtattcagagcaaaaggtagttcagtaaagctttcaaagccccagccaaagggatagaatttagagtcaggacctcattaaaaaaataaaaataaaaaggaactgaaaagagtgaaatgagatgcctgttctaaacaggcctggagatttgagcaagttctcaggacagcaactagaagaaggtaagaatccagaaccagaactcaattaggagacagaaacttggtcttaggagaaagtcagatgccatttattataaatgaggcacaagatcagagataggatctaatcaaacatatattgatgttcagcaccttgaatgttggattgtagaactctttacttttccactgggaccatgtgccagatcattctttatgccatgagtcaaccagagctggaggcatatcatgggttgaccttcgttcatcatgtccaatagaaatagaattatttaaaatacaaataatttttgcttatttatatgcctaaaattcttgcacctttcctactaattcttcagattgcattgagtcacacttatgcttatttagtcttttttttaagtgggaagtatgctcatttaatttgggaaattaggatctctctcttttttttttttttttttttttttaagatatggggtctcactttgttgcccaggctggagtacagtggcacaatcatagcttactgccgcctcaaattcctgggctccagcaatcctcctgcctcagcctctcaagtagctaggactataggcatgcaccaccacaccaaactaattttaaaaacatgtttgtttgttttttggtagagacagggtcttgccatcttgcccagactggtctcgaaatctgagttcaatcagtccttctgcctcagcctcccaaagtgctgggattacaggcgtgagccaccatgcccagccatcttatttttttataatccttctcattccttaagaaactgaaaggctggaagcttctcccttgaatagaaagcttcccagtttccagtcacctagataatagggtcaactcaattaaattaattcttaaagatgtataaacaggaaatcgtggtctttgcattgctgtaaagaaatacctgagaccagggctgggcgtggtggctcacacctgtaatcccagcacttttggagcccaaggcaggagaatcacttgaacctgggaggcagaggttgcagtgagctgagatcacgccattgcactccagcctgggcaacaagagcaaatctccatctcaaaaaaaaaaaaaaaaaaaaaaaagaaatacctgagactggataatttataaagaaaagagttttgattggcttgtgattctacaggctgtacaagcatgactccagcatctgcttctggtgagggccacaggaaactttcaatcatagtggaaggtgaagaggagcagcatattatatggcaagggaatggggagataccacactcttttaagcaacaagatctcatgtgaaccaccagagccagaattcactcatcaccaaggggatggagctaagcccattcatgagggatacacctccatgatccaaacaccttccaccaggcttcacctccaacattggggattacacttcaacatgagatttggcgaggatgaatatccagcccatgtcattctacccctggcctctcaaaccctcaaatctcatgtccttctcacactgtaaaatccaaccggcccttctcaatagttgcctcaagtcttattccaacattaactcaaaagtcccaagtccaaagcctcatctggagatgagatccttctacctgtaagtctatgaggttaaatacaagttaaccattcccagttacaatggtggtacaggcactgggtaaacattcccattccaaaaggaagaaattggccaaaagaaaagggtaacaggccccatgcagttctgaaacccagcagggcagacattaaaccttaaagctcctaaataatccttgtttccatgtcccacaccctgggcacactggtgcaagtggtaggctcccaaggccttgggcagctctgcccctgtggctttgcagggtacagcccacatgactgctctcactagatggaatgcctgtggcttttccaggctgaggattcaagctgcccatggcgctaccatactgtggtctgaagggaaacagcctctttcctgcagcttcactaggcagtgccctggtggaggactctgtgtgggggctccagccccacatttttcctccacactgccctagtagaggttctctgtgcaggcgctgcccctgtggcagtcttctgcctgggcactgaggctttttcatacatgtcctgaaatctaggggaaatctgccaagcatccttcatgcttgcattctgtgtacctgcagacttaacatgacatggaagctgccaaggcttatggcttgcaccctctggagcagcagcctgaactgtacctgggcactttgagccatgactggagccagaacagctgggatgtgggaagcaatgttctgagactgaccaggacaatggggccccgggcctggcccctgaagccattctttcttcctaggcctctcttcctatgatgggaggggctgtctccaagatctctgaaataccttcaaggccttttgcccattgtcgtggatattagcacttggctcccttttagttatgctactctctttagcaagtagttgctccatagcctgcttgaattcctctcctgtaaatgctttttcatgctctgccacatgattagactgcaaactttccaaacttctttgttctgcttcccttttaaatataggttccagttttaagtcatttccttactcccatatttgattgtaggttgttagaagcagccatactacctctagaacactttgctgcttagaaaatttttccaccagataccctgttatcattaagttcaaacttccacaaatccctaggactcagacacgatgcagccaagttatttggtagggaataacaagggtgacctttgctccagttcctaataaattcctcattttcatctgagacatcctcagcctggccttcactgtccatatttctatcagcattgtggccacaatcacctaacaagtctctaagaagttccaaactttcccacatcttcctttctttctctgagccctccaaactcttccaacctctacctgttacccaattccaaagctgcttcccacatcttcaggtattaatagcaacccctcactccttggtaccaatttttatgttacaccatttttgcacatctgtaaagaaacacctgagactttgtgtaattttcaaagaaaggggtttaatttggcccatgtttctgcaagctgtacaggcatggcaccaacatctgttcaactcctggtgagaacctcaggaagcttacaatcatggcagaaggtgaaggagaaccagcatatcacatggaaagagcgggaccaagagagagatgggggatgtgccacacacttttaaacaaccagatcttgtgtgaactaccagagccagaattcactcatcaccaaggggaaggtgctaaggcattcatgagggaaccacctccatgatccagacacctcccaccaggtccccccttcaatgttggggataacattttgacataagatttggaagggacagaaatccccaccatgtttggtggcatcatgggctgacattaatacatctctttaatgggattggaagttaggagatgtttcaaggaggagattaccttgaactgagctgtcctggtcagttggccatctgagagaaagaaatggggtccctgccacaaggcgcctgggaaattaaatcccagttagagaaataggaagacactcaggaagtaatcagaaagacacttcactggttatttccccccagcagttttgctgcgatgaatttcaggggtagaagcaggaatggtggaataaggaattggaattcaggcctacttgtataaggccctcctcagttgacctataccagtatttctacatttttcttatttgacttctcttaccttgtaaaatatatagaaatcagtggtttctagggtctgcagagtggggtgggtggcactaaaatacagtagatgttaatacccgtcttagacttaatgaatcagaattatccagggtgggatccaggaatctgaacttttaacaaatctcttttgttattcttaactggtactcctcaatttactgtttaggaatcttacacatgggggaggttgagacacttaactaagctagttggtggcagaaatgaaactgtgatatggatcttctaactcctgctctaaagcttttgatttatagtatagtattaatgaacttctattgtgaacttgcagaccgtttaatattaggttcaatatactatgtttaaatgggaatgaatttcacagggcttatagagcctttccccataattgtaaaatttttgcagcaaccgctatattactgttgctacaattttctttgctaattaggtctctttgccttgtagctctcacttttaaattgtttttgttttgtcatttagtagatctcagagcaattaactaaactaattcttccatctttttttaaatggagacatctcctcctcactatggcaggaagatctgtgatttctagtataactgcttgatgtgaggacagggttacttgggaaagaactttcagcatgagtgatttaattatctgcctccattagataggtacctttctcttgcttggctcctaataaaggaacaagcactctcatccattttacggtttaaataaattttacagttaaatatgactagatatacttttagtacccaaagttgtggatattttgttccataaaagctaattactaatagaaaatggtttgctagataaattacttaactgaaaatatactagaagcttatttgtgctttctaaaaaagttgataattatgattcactggttagaagttgtagattttacatatccctgatgtatagatggataagtgcaaataggaaaactatgctcttaaattatcatgattgcttgaaaacttggtaatgctcagttctcagtctggtttcatactagaaactcctggaagttcttaaaaatacaagtgaccacattctactcctgagaaatttctatttatttgacctaagatggatctcctgcctctgtgtgttatgaaagctccccaggtgattttaataagcagccatggttgagagccaatggtctaatggaaagagaactgaattataatcaggaaacttgtcattccagtcttaattctgtgaactcaggtaaatcatctaacatatttaagcttgcattgtaaaatggaggtaattaataatggcctatatgccggattaatatttttacagttgaatgaaactatatactcaaaagtgctttgcagtaaagtgttatacagatggtggcatagcaattaagatttactacgcaatatactactgtgaagtggtatgtttagtcttttgtacttcttggcagaaagatgctagatcccctgtggcagaaagaaacttaggctccttagcgatcctcagggtatattattatgattcttaaagttcactctgtatttttatgtgtaccaggctgctagtgtctctaggtgatagggggaaaaggtagaggaaagggtggagttgctcctgctggtgattttttaaaattgtgagttcctataattagtaacatccttcttacatcttcatagagacatggttggtagcagtggagtcgtttatataactttacaaaccctctcttgtgtactctttttcaatgttattctcttaaatcacttctgtctctgctttccctagtgtttaagcttcactaacatttacctatatataaatggatgaggacagaagagaaagggtccccaaagatgaatacactcattactggtttcccaacatgatataaacctaggacttcaccccttggagggatgaaagtttactatgcatagcatttcctggtgtgtcagtctcggtacagcctcttgctcaattcatcagctgtttccaggcaaaattacataccacttcttgagtgttttaaagcctcctaactgtatatatgtgagttctttgatatattgacttctttttctttgagtcgattcccagtagtggcattgctggatcaaatggtaattatatttttatttttttgagaaatctccatactgttttccatagtggctgtactagtttacattcccaccaacagtgtatatgagttcccttttctccactttcttgtcaacatctgtcttttttaataatagggattctggctgaggtatgctatctcattgtggttttgatttgcatttctctgatgattcatgaggttgaacattttttcatatacctgttggctgtttgtatttatttttttgagaaatggctattcatatactttgcccaagtatgaatgggattatttgtttttttcctgttgagttgagttccttatctgttctatatattagttcctgttggataaataatttgcaaatattttatcccattctgcaggttgtctcttcactctgttgatttttttgttttgtttttttttttttgtgtgtgggagctttttagtttaattaattcccaatcacttatttttggttttgttgcctgatcttttgaggcctttgtaacaaattctttgcctaaaccaacaaccaggagagggttccctagattttttcttctaatatttctatagtatcaggttttacttttaagtctttaatctactttgagttcatttttgtatatggtgagataatggtccagttacattcttctgcatggctatacaattttcccagcaccgtttattgaagagattgtcctttccccagtgtaagtttttgttgtttgtttttgtgtttttttgagacagagtcttgccttgtcacccaggctggagtgcagtggcatgatcactgctcactgtggcctcaacctcatgggcccagatgatccccctgcctcaccctcccaagtagctcagactacaggcatttgctgccacacctgactggtgttttattttttgtagagatggggtctcactctgttgcctaggctggttttgaactcctgggttcaagcaatcctcctgcctcagccttccaaagtgttgggattacaggtgtgagccactgtacccggcccccagtataaattcttgttggctttgttgaagatcagttggctgtaactatgtgtctttatttctgagttctctgttttgttctactggtctatgtggctacttttataccatgttgtggcatttttaaggattttttttttaagtggggagtttgagaccagcctgggcaacatggcaaaagcctatttctacaaaaaaaaaaaaaaaaaaaaaaaaagtagaaaaattagccaggcatggtggcatgcgcctatagacccagctacttgggaggctgaggtgggaggattgcttgagcctggaaggttgaggctgtggtgagccatgatagcactactatgctccagcctgggtgacagagcaagaccctgtctcaaaaaaaaaagaagaagaagaagaggaagaggagggggaggggggaggaggaggaaagaagaagaagaggaggagggggagggggaggaggaagaaagaagaagaggaagaggagagggagggggaggaggaggaaagaagaagaagaggaggagggggagggggaggaggaggaaagaagaagaagaaagaaaagggggccagatgcggtggctcagcttgtaatcccagcactttaggaggccaaggcaggtggatcacttgaggtcaggagttcgagaccagcctaactaatgtggtgaaacccatctctactaaaaatacaaaaattagttgagtgtagtggcgcacacctgtaatcccagctactcgggaggctgaggcaggagatttgcttaagcccaggaggcggaggttgcagtgagctgagatcgcgccactgcactccagcctaagcgacagagcaagacttcatttcaaagaaaaaggaagaaagaaaagtggtatgagcacaagaactctaacaaaagatttctggatggattgggttaatggaaaactggcagaagcctggaggaaggagaaggtcaagatcagctaatagtagctgataagaagtcctgtatcattatgaagagtatcaaaagcacccctgcagcctgggatggttgactgataactataactgtaaaacaatataatccgatgtgtatcatgacttaagagaatttgagaagaacagaaaggtgaatgccagtattcaatggccaatggaacatgtgtttagggactttatagcaatacttcagtgctctaatgttcaggtcatacctccctatcattccctaggtggtgtgttatctgtttatatttttatctgctatcctaatctgggagtcctctgagtgtagggatgacttatccatctttgtaaatgtcctcaaaatgcttgacatatgatgaatatgttaccacaacaccaggggttcagtctaggtcctgctgctcacagcacagaaagccaatgactaagatgatgattattgccaaggaagaaggctttaattgggggctgcagcagacgagatgagatgggagctcagtctcaaatccatctccctgacaaactgaaactagggacttatatagcagggaagagatatagcaatatgtaagaaacaggaactagagaggggtaaggaagcaattatggtgaatgaggggccctcatctcattatctggatatggtgatctggtgagttccagttcttccatacttttttttgagagacctgaaggtcctttgttgagtaaggaatccgataaaacaaatgttaaggttcaagcttcaagaccaaaaacgtcaatttctatgtttatccaaaaaactatctattgaactattgggtcagtttgaaacacatgttaaaacctctaatttgatttccttatctcattttgcctgccttgtttctgaaagttttatctaattcagatgtcacaaacctctaaaaatttctttccttgttcaacaaaccccctatgtcacaagtttacctgcataacaaacctgaacatatacctttgaacctaaaataaaagtttaaaataaatgaataaataaataaataatagcaaaactatgtttttttaaaaaaaattcttctcagagtcacctatgataaagacttctagattttgtagatattttactacttaatctgtacaaacaagtgtaaaccaagaaaatattttaaaattactcatgactaaacagatgcattcatgttaaacttatctctcatccctacccattcttgaactctttctcattcactagtcatttatgaaaaaactgtataacaaataactataataaaatggaaaatatataattaagctagaggaaaggaagggtgggagtcatcctttttttttggtatatgttagtaaattaatagtaaaaataagggaggacttagccataagggttttaaaacagcatgtctcaatttgtatacaaggctactatgttggtctgtgaaatacgtaaaaaaaaaaaaaaaaaaaaaaaaaagcgattgattttcagtgctgcaatcctgacctctagtggacattcagaacaaaacccaaacatcacattcttttatttagttactccatcaagcaccattagccaacctaaaatattaaactttcaaagagattaaaacatgagaagcagaataaagtaaaagaatttttggctaatattctaaatattcttgctgtagaacctgtatttaagagcagctagtattaacttatttctttttgcgtgttaattatctgtcactttcactactttctttgaaacaatgcattgctttatagatcatagcagcaagaaatttatcagagaagccaaatggattttcttttgattacctgtaatatataacaagctatacgaaaactgagtggctttaaaaggacaatgatttttatagtgagacatatagtgatgttatgtaacctcctgatagaatgcactgagaagggcacagcatcacttctgtggtatttgtgcccaaaatacatattctgaatttaatcataaggaaccagtagacatatcgagttgagggacattttataaaataactggccaatactcttccaaagcatcaaggtcatgaaaaataaacactgaaaacggtcccatatgaaaggagactaaggagacatgacaaccaaattcaatatataatccagaattgcatcctggaccagaaaaagggcattagtggagcatttgataaaaataatagtttcttggttttgatcattatactatggttatgtaagatgttaatgtttgggtaaaactgagtgaaggatatgtaggacttcttggtactgtttttgcaaagtttttctaaatccgaaattatttccaagtgaaaaaaagtaattaaaaccaatcatttattttcttacaatctcatgagtcagaaattttggaattcaactgtgtggttcatctctgatccacttggcatcagctggaccacctgattcacttccagatgacttctttactcacatatctaccactttggtgattcttggtctttcttctttactgatgaaatctggttctccaggccttcttttgattgcttggttccttagagagcatgggagtataagtataattgcacttcttatatggtagctggcttcgaaaagtgagtgctccaagggactgaacatgaaagctgtcaatatctgaaggcctgggcacataaactagcatggcatcacttccaccatattctactggtaaaagcagtaccatagtctgcccaggttgaaatgagagaacagagaccttaactctcaatggagaagcatcaaataattgtgactctttaatccatcacagatatctaacaaaagtctcactgagttggcactcaagatggaattagtggaaaaaagcctggatttgctttagtctgatagacctgagttatagcctggctttaccatttactaacagtgttctgtctctgagcttcagtttagccatctctaaaatggtggcaataatacatatgccatagagctgttgagaggattaagtgaaaaatataaaatactggatataatgggcaataaatacatgaacctaataataataattgctagtgtttatcgaatatttaccaaatactcagttcacttgatgtatgctatctcatttagtcattatctcttcctagggtggtatgttttcttttgtatgggtcagaaaggacagaaccccatttcctctagctttgtctgtgaacctgctccatttactttggccatttttggtttgataatttggtaatttggtttattgacttgttgttaggatttccattatttcccttttattttgattcctaagaacccaggtgctgatgcacacttggtactttttgacactaccttttcagcatttgttctcagtgctgtcagcttaagtttttgacagcttctcacacaatctgtcagctctctctgaacccacgattgcctgcttatcagagccagaatgttcagtgtctttgtttcagtgagtgctctactgtcagctgttattttatgcaagattgtgggtgcttaatccttggcctacccaagaacatcatgatctgcactttggagcaattattcaatttggggcaattacttgtaggtgttctttaaagcaaagatgatgccagaatgtaattgaattttgaaatagcagtatccaaatcagttaaaaagctacttcgtcatgcatgcaaggctgatctcaatctgttgtcattagaggaaggtggtgaccctttcttcccacagcaagttgggtttttgttgcctcatatactgcaagcagtcagctactttttttgagtgttttcaatatggaaacaaataatagaatttagttctggtagaagtcacttatttgttatctttttactctctgctctcaaaatttacttgcctttaaatggaaagaatcactttaatcctttaggaagtagaggacacattaaataatatccaaataagagatttattcattcattcacatattcattgaatcatcttctctaacttaattgtttagagtatcacttttggaattaggttaaaatcctagatctgcacttattagctattggacttaggaaagttactttgatttctctaaatcttgatttccttgtgtataaaatggaattttaggtggttgtgggatgaaatagggacatgcctttaatgtaattaattcatatcttggcacatacaaaatactcagtagatgttggttattattttgcatttggagttagaccttgtactataaatgataagtggccataatatgtttacttattttttactcttaataattctccaaacctttgactcctactacgtacatgttttccccttaagaacaaacaaattgctggggattacatattcctaaaaatgggaggcatcttgaaaatgtatgagatattttgcttttaaaaatacatttcaaggctgagtgtattgtctcatgcctgtaatcccagcatgttgtgaggccaaggcagaaggatcacttgagcccaggaattggagaccagcttgggcaacatagggatacctcatctctacgaaaaaattaaaaattagccagatatggtggcacacacatgtagtcccagctacttggaagctgagttgagaggattgcttgagcctgggaggttgaggctgcagtgagtggtgatcacaccactgcactccagcttgtgtgacagagtgaaattctatctctaaaaaaaaaaaaaaaaaaaaaaaacctgatagaataacaagttcttttctgaattccatcaactcaaatgtcttaaagtgtatttgtttgcatcgtctagccactctgttctactttagttcaaggcttatgaagtctttatttttatgggtaatgtctagagcttcatataagcagatatagtaataccttatttttctgaacttgtttaaagaatttacatacataaatttttctggtaactgaaagtttcctctttagcttcccaaacttcaaaacatcattatctactttttatttaaaacacacactcacctcccttcttaagcacagtattataacatgatataagcattcatcaatcctgctggattatcattattaataatgacaattaacagtagttaataattaactattgaagattattggctcccccaagtggacccagagagctatgcattttatctttttttttttttaatatatgtcttcatttctgtgagatctaatattttaattctgacaactgtctctataagctatctatccctgaccccatctggcacatactttatcttgtagtttgctacttgtaatatctataagcttcaaaatcatatcaccaaactaactggaagtatgtatagaataaaaagtttagcaaagtttcctcttggtgtttgtgagagctattttggctatttagagatctttatttacttaatttttacttgtaagttctttgtgtcttggacagcttggttgtctaattgtttgattttgagataattgaagaaaggggttcttactgtaatttgatgataattctgtaaattggtctagttgggtccacagggaaataatcaacccccgaaaatttgggaaagctagtgtagtttaatcattcagtcttcaaataagcatttactatgcacattataccagcactgtgtgagaatatctcacacaggaggcttgagggggtgattctagcctgttactaaacacatatgtaaaccaaaaacatctgagatgggtttcaatcaatttagaggtttattttgccaagttacagaccatgatccatgacacagcctcaggaggtcctgagaacatgtgcccaaggtgattgggtttcagattggttttatatgttttagggaaacataagacattaatccatggccgagcacagtggctcatgcccttaatcttagcactttgggaggctgaggcaggagggttgcttgaggccaggagttcaagaatagcttgggcaatatagtgaaaccctctctaccaaaaaaaaagaaaaaaaaattatctgggcgtggtggcatatgcctgtagttccagctacttgggaggctgatgtggaaagattgcttgagttcaaaaggtcaaggctgcagtgagctctgatggtgccactgcactccagtctgggtgacagaacgagactctgttcttaaaaaaaaaaaagacatcagtccgggtgcgctggctcacacatgtaatcccggcactttgggaggccaagacgggcagatcacttgaggtcaaaagtttgagactagcctggccaaaatggtgaaaccccgcctctactaaaaatacaaaagttagccaggtgtggtggcagagcctgtagccccagctacatgggaggctgaggcacaagaatcgcctgaacccaggaagtggaggttgcagtgagccaagattgcaccactgcactctagcctgggcgacagagcaagactctgtctcaaaaaaaaaaaaaagaaaaaagaaaagacatcagtcaatacatgtgatgtgaagcatacattcattcagtgcagcaataattcagagatggggcttccaggtcataggtggattcaaaaatgttatctttttttttttctgttcttttctttctttctttttgtttgttttttgagacagggtctcgctgtgtcatctaggctggagtgcaatggtgtgatcttggcttactgcagctcaacctcctcagttcaagcactcctcctgcctcagcctcccatgaagctgggaccacaggtgtgtaccaccacacctggctaattttttttttactttcttgtagagatggggtctcactttgttgcccaggttggcaaagatttcctgattggcaattggttgaaagagttgttattatctaaaaacctggaatcaacagaaaggagtgtctgggttaagataagggcttgtaaagactagagttcttattatgtatatgaagtcttatgggtaaccactcccagaggcaataaatggcaaatgtttcctttagacatcctaaaaaggttctagactctcagccaatctcttcaggatcagaaagtgacctggaaagagaagggaatcctctatagaaagtaaattttccccacaagagacaactttgtaggaccatttcaaaatatgttcaaggaatctttattttattttattttttttgagatggagtctcgctctgtcacccaggctggagtgcgatctcggctcattgcaagctccgcctcctgggttcacaccattctcctgcttcggcctcccaagtagctgggactacaggcgcctgccaccacgcccggctaattttttgtatttttagtagagactgggtttcaccatgttagccaggatggtctcgatctcctgacctcgtgatccgcctgcctcggtctcccaaagtgcttttgggataaaatagtttggtttctttcagggccctgctatctgctatgtgatgctatacttagaatcacgttggaatttggtatcttattgctacagggtgtttgctgtctgtcttaggatctctcttttaatgttaatgctggtcagttgtgtgcctgaactccaaagggaggagagtataatgaggcatgcctgattgccccttcctgtcgtgatctgaactattttttcaggtttagctgggtccctttggtcccagcttagtcagttggagggcttagaattgtctttttggttttcacaggtataatattgggctagtcacattcatactctaagaaatgagaatcattgtataggttgttataacaatcaatgaaatttcacaattcctgtgaatgtaaggaatttggggggaatgtttgacagggaggttaagaatacagccaaggtagctgaacatggagtggagtttccaaaggctaccatgaaaggatttggaaaggaaaggaggagtagcaaactagcttaggataaaggaccagagcattatgaagatgagaaaactagacatgagagggatttgcattttgagcagtgactggaaaaacaagaaccagagaaatagtggatcaggttctgatggcaagctgataaacactcaggttgtgagaattcactgttgcctagtggttgtgatgtggtggtggacagagttggagaacagggcagtaggtcttttttatattggcctttaagttttggcaggtgggcagcagctagtgggtgagaagtcaaattttgattcagaaagcaaattttgcttaattgtaacccacattttaaaatctgtaatagtcttttttttctaattggtaaattgtggtcaaaaccagtccaggataattgcttagtatggtaatgaactgtgttcatttgtttttatctcctggcctgattatacttatttcctattgcttttggtttcttaaataatcagctgagtaaaccccaaaccaaaaatatttggtttatattttaaccaactgaatatttgtgtttatcattcattccttccatcattatgttatatttctggtacctgaatgtgaaagtttatgttagcaaatcataacaggaatacactctaaatatctgggcctaatccttgcttctggagttatttcagagacagaagaagcatggtttattataagttttttggatagcacatttggtatagctccatatccaaaagccagccagaatgtatcagtgaccaagatgaagagggcacatcaaatagaccctggacttatgggacttatgccaactcatacttgaaatatcttttttcttatgtatgatgacttgcatggcaaggaaacagcacattttgtagcaaacatttctgattgttacctttatcatataagattctctatcttttgaatttaataactcaatgtctcttcagagcaattgggcagaacccagagttcaaaattcagttctagaatagcttcttaaggaacaatttaatttgtttatttctaaagaaatattgctatggttttcagaaaaggaaaggaagtctggcagatagcccctaatgaccacctctagttatacaaataatacttgaaagcaattgctaaaacaaataagaaaacaataagaactgtagtggaaatgcagtgtgatacttaaagcctccagtacacaatctgtcccacttatcagcaacactgccttgtttttttttattttattctgtctgccacttgcagtttaactgtaacaccgagatgtccagattagggttaggaatttcaattaataattttagacttctgcatcattatgccagcttgagcaaggaacttgactttcacaagacttaggcacatgcaaataatccagaaattgactgaagggaaataacttattgtaaaaacaattttatgtgaacattgattaaatagcacctaaaatttataacaagccactcagggaaagaaaatacctttaaaaaaaaactcatggtttaattattgtttgtgaagatgaaagcaattaggaattttattaaatatatgtggaagtcttggggaaataataaaatagtgatacatgtggcagtactaatcttcactttctttttctatttcagggtttgaacataatctttcatgtagctttggctctcctaaaggtaagtcttttttttaatcttaagttaccacattctcttacctctttgcccttggaactggaataattcaatttacagtctttgactcatttcagtttctcagacacacaaaaatagatgacttctctgagaaactctgatcctcttccctcctctcatctttttctgttgttgtttatttggagtcttttttttcttataatccatttatttaatggtactatcatagagctctttccagtaacataaaatatctttttatcatatgaattggatgatataagagaaaaggttaaaaattgttttctgtcaaaatgatgcctgcttttttcttaaaacactttttactataacatctctggaggtacctaaacatataattgaattattaaaaagtttttataatatactgactaaaaaagaaactgctacatttcaatttgcagttctttccatgatagttagaaatttataaaacactttagaattctattgtaattaccttgttggattttatgtcaacatatcatacagctttaataatgtggtaactgcaaggcatttgctgcagagttgatgaagataacccagctggtttttgtccttcagtcagagaagacattctgatattaaaggcaataattgcctcaaaggcacaggcttaccctttcctcagtataacatggtggttaaaatggcagacctggactcagacagatttgcttctaatttcagccctaccatatgaccttaggcaaatttttctaagtgctcaaagtctgggttttgagataataataggaattaatttatgggattgttaaaagaattgagatgatcaaagaagtccttagtatagtatctagaacattttactgcctagtaaagttagctgtcattattattgttctttacaaggtgactcagaatgtgttcttagatcccttatcattcttctgaatctctcaaaagataatgatgtggtatcataggaggacctcttgatacgttaggagagccttaaccatacctaaccattaacataaccttgattctaaacaaaggcatgaaatagtacaggccctctgcaactcagtaagtggatttctattcctcatctcttattcctttacacatttgctctttgtgaagttcataagatacactttttaaaattaaatcgattgtgtttatatattttttatgccaaagctatttagaaaatagaaaaatattttaaataaaataacacaaacatatttgctgtgtcccttaatgaagtcatgggttttgacctctaatttttttctttcattaaaacaaatccaagctgaaactttccaacatgtcctctcaacagggctggaataagacttttagaatgcctaagcattgaaagtatatgtaatacagactaaaaaaatattaaaacataaagtaagtataaggaggtccaagaaagttctgatttctcatattatatctaatgttttaaactctcagatattatgtctttcctaaaatgcctttcctcatttttttggtgacttatctttactagtgctttcactgaatgcttaatctgtcttttgagtaacccaggactacctctctggatatcagacctataccctgtgtcaacttaatactatatacattagtaaattatcttcttgattgacatgttgacttgttcatattattttcatttattttgtccatgttaacacagacaaggcctctacagaggacatactctggccactgggcaggaaggctttgtctgtcttctttagcaatacatgggcactcttgtagcatcatcttagagaattttactagttagagaagataaaaagagccttctcaccactagtgccctatatttatgtaacttccttatatgaatcctgaagctgacccccccaatagacagagtatatatgggactaaactgaagtgtactttaatgatctattgccaccacttggaaaaaaagaatacgcaaacatatatgacagtcactgactttcagcttctagtgtagtataccagataaaataatatgtatttgtttatatcaaaattaaaaactttggagaagttcaaattgctgggtttttttttcttttgttttgttttgttttttgctttttgagacagggtcttattctgctcactctgttgcctaggctggagtatagtggcgtggtgatagcttactgcagcctcaaattcctgggctcaagtgatcctccctcctcagcctcttgaggagctagaattacaggtagatgccaccatgcccagctaattttaaaaatattgtagagacaggggtctcactatgttgctcaggctggtctcaaactcctggactcaagcagtcctcctgccttggcctcccaaagcactgggattataggtgtgagccaatgagcctggccttcaaagtgcttatgaattgagcctaaggaattttcagtatagctacagagagacttcagatttctctgtattataagcatttcttgtgatgaggggacagaactaacatttcttgaacatttatactctgtgttaagtactaacagattatctcattaacatacattaaatgtctaggatttatttgtagaatagtaatggtattagccagagaaaacatctaattcttcccccagcccctagttgataattgagagatcaaagctcaagatcaccttaagacttttgtctcagtagtgggaaagttggatttataatttttttgaatgggatagatataggatgaattctgtgttgctcagttaggttttaaagacacctactttctgaacgggaccaacttctttttggttagtaatagcctatcaggtagctaaaaagctatggacctaaaagaatgattcacaatactaggcagcatcatgaaatcattttgtgtccagtaggtaggtcagatatattcctccaaatgtaatttatttacttatatgaaacattaggtagtcatagaatacattcaatagatttaatagactggagatgatcagtcagaattgttcttagcacttcatgttgggcacagaaatttttcagtcagaataggttttttgtttgctgtccgtggttaaaagcaaatgacagagtgtttttctctggccttcccaaagtattatatgcttatttcgtgtcctacatgtgtatgcagacactacagagataaagaaagcccaatcataatcctgttcccagggatgaccataataaaaacttggtataaaacctttatcccatgctttggcctatggttatataagtatgcattacctacctatacacatatgtatatatgtatgtatgtatatttttaatctgagtttgagataagatgggaaagtgggaggaaatccagaagaacagtgtgaaaggatgcacataaatttattttctttcaaaaaatgctgttgaacaatactctttttcattcagtatatcgtgaatatctttccatgtcactaaacacatgtaagggttaaaagcatgtggacattggagtcagactacttaaattcagattcattcaaaacaatttatccaatggtcttaggtaaattacaatttctccattttttaaatgggggaatattagtaataccagtctcataagattgttgtcagagtttaatgagttaatatatgattgatgcctagaactcagtactacagtgtactgaggtgctattgttagagacagaatttctcttttgactggtttttatcctactgtatgtgccataatttattttgaggcagagtctggttctgttgcccaggctgcagagcggtggcacaatcttggctcactgcaacctccgcctcctggggtgcaagtgattctcctgcctcagcctcctgagtggctgggattacaagtgcaagccaccaagccctgctaaattttgtatttttagtagagacggggtttcaccatgttggccaggctggtctcgaactcctaacctcaggtgatccacctgcctcagcctcccaaagtgttgggattacaggcatgagccaccgcaccctgccctgtaccatatatatatatatttttttttgaaagccactgactttattgatctaaaaaactttacaaggacagtgacttttctgccaaaaaaggagccaaatggtatcaaacggactgaaattgagggtgggggtgagggatggggccaggaatccattcaggaaagctggtgactgtccccagggaagtagcaggggaaaaaggaaggcggaggcatgcaagagtgagaatccaaaaaagttaaaatgattaggagagaaaactcccaaaagaccctggagtacattggaggtgagtaggacaatagcagtcttttcctttgttgaggacaggggaggagtccctactcggttgcaaactccggatgagggctggggattgagggcttcccagaaagcatcacaagaaggtgtcacaccactctcgaaggcatctgaagcagtcctgggactgcttggcattggcaccaccagtgtccctcagccattctcagaagaggtcttcatctttctttagcaccagaaactggccaaggacaacataggccttgtcaaagcacccttcctccagcttcttgtccataacttcaccaatcccggccaggctccctactggcttttcccccacggactctgccacaaagtctcggtgcttttgggaggttgtaatcttgttcaggtttaattgtcagcttcagttcccataatggttcctcctgccacctggctgctcctgcctatacctcaagccactagaactttcccctgtaccacaatttatttaaccaattttatatttagtttttatggacatttgtttccagaatttcctgttaaataaaaccgtaacaaatatccttaaacttgcatctttgcatacttatctgatatctctggggtaaatttctagagatggaattgctaggtcaaactgtaaccaaattttaattttggatacatattacaaaattcttctctgctagcaatgtgagagtacattttcccatactcttcaaaaatttctaaacattaagcacctttatggaaatcaaaagcaagttataaatataaatataatatataaatatataaatttatttatacataaatataataaatataaatgtaaaacaaagcaatttaaaagtaatgatttagtaattttttattactaaatcatataaataaagctcttcagccagctttgaagactccagtattttcttttttggggagaatatccagtttctttagggaagcagtggatcatggctaaattctagaagactggaccttctcttagtttggaggggcttatataaaagttctgacactttagggggccaaggtgggtgaattaggtcaagggttcgagaccagcctggccaacatgacgaaaccccgtctctactaaaaatacaaaaaacgccaggcgtggtggtgggcacctgtaatcccagctacttgggaggctgaggcacaagaatcgcttgaacccgggaggcagagtttgcagtgagccaagattgcaccattgtactccagcctgagtgacagagcgagactccatctcaaaaaaaaaaaaaaaaagagttctgaagtgtatctttgatgtttttggcttttcagccctttccagtatggtttttccttaccattccattgaagcttttttagtatcttacttgatccttcaacagttgtcaaaacagcataatgacatacacaacgcttccttttttttccccttctttttttatgttttggaaacatcttcccttggtttctgtcctttcttttatctccccctctgctacttctgtctttttttttcctcactcctttttccccctagccattagcttggagttctacagatctccagcctctaggaatttgcttattgcttctcccttgttgatcttattcattcccctggtttcatctataaatgtttactctcatttatttttattttttttaatccctcaccgccctcccaccctttccccttctgagtctccaatgtccattttctactttgtatgcttttgcatacccatagcttagctctcacttagtgagaacatttggtatttggttttccattcctgagttacttcacttaggataatggcctcctctttcaagtttctacaaaagacattatttcattcttttttatggctgagtagtattccatggtgtatatattaatatatcacattttctcatctactcctcaggtgatgggcacttaggttgatatttactctcatttatatttaatccaaacccacatatttggctgtggactgaacatgtcggcttggatgtttcacaggcacatcaaaagtcaaaactgaaataatgtgccctcccaaatgtacttttcatctagtaacctccacttcagtaaggactctacccagctgctcaaaccagaaacctagaagttatccttaactctcttcttaatatcccatatcagttcagtcaccaagtcctgtggattctacttcttgaaaatttttagaatcttcccacttttctcctattcttacttaggtagcttttaggccaccaaattttccaggaagatgatgccctcctggattattgcaggacctcctgtaataataaatattggatacctatgaagtgccaggtactgttctagacattggagataaagtagtaaccaggaaagaccctgctttcatggaacttgcattccaatgagagaaagatagtaattaaacaaataaatgaatatatatgttagttcattcttgcattgctataaagaaacattcgaggctgggtaatttatttaaaaaaaaaaaaaaaaaaaagaagtttcagccaggtacattggctcatgcctgtaatcccagcactttgggaggccaaggtgggcggatcactggaggtcaggagttagagaccagcctggccaacatagtgaaaccctgtctctactaaaaatataaaaattagccaggcatggtggcgtgtgcctgtagtcccagctacttgggaggctgaggcaggagaatctcttgaacctgggaggcagaggttgcagtgagccaaaattgcaccactgcactccagcctgggcaacagagtgagactctgtctccaaaaaaaaaaaaagaaaaaaaatggttttattttggcttacagttcaacaggttatatacgaaacatagtactgatatctgcttctggtgagggcctcaggaagcttacaatcatggcagaaagcaaggggagctgtatatcacatgacaagaggagaagcaagatacagaagggggaggtcccagactcttttacaacagccagatctcacgtgaactcactgagtgagaactagctcattagcaaggggatggcaataagccattcatgagggatctacactcccatgacccaaacacctcccactcggccctaccttcaacattggggattacacttcaacatgagatttggaggggactacacttcaacatgagatttggaggggacaaacatccaaaccatatcaatatgattagtttagatcatgctgaggtttatgaaagaggtaggtttgagaagatggtggcttggatttgagtgttagcagtggaactgacagaagtgggtgactgcactttccccatatactcttgaccattgttgagtccgttgccacactgccagtagtctttttaaagcagatttttttttttttactttgaatttcaggggtacttgtgtaggtctgttatatagataaattgtgtgtcatgggggtttggtatacagattatttcttcacccaggtgataagcatagtacccaataggtggtttttggatcctcaccctcctccaccctcaagtaggccccatgtctattgttcccttctttgtgtccacgtgtactcaatgtttagctcccacttacaagtgagagcacgtggtatttggttttctgttctgtgttagtttgcttcggatgatggcctccagctgcatccatgctgctgcaaaggacatgatctcattctccttatggatgcatagtattctatagtgtttaccacattttatttaaccagggtactgttgatgggcatctaggttgattccatgtctttgctattgtgaatagtgctgcgatgaacatgcatgtgcatgtgtctttatggtagaacagtttatattcctttgggcatatacaaagtaatgggatggctggatcaaatggtaattctgttgtaagttctttgagaaattgccaaactgctttccatggtggctgaactaatttgtattcccaccaacagtgtataagcattctctttactcttcaccctcacccagcatctgttgttttttggctttttaatactattaaagcagattttagtcattattcaacaatatttagtaaacacctatttagagacagatactgttctatgtgcttgaatagaaatgagtgaactaaagtaacaaagctacttgcctctgtggaaattattttctagcaagagacagttgataattgtattagttcattttcacactgctgataaagacatacacaagactgggcaatttataaaagaaagaggtttaatggacttacagttccacgtggctgggccaggcctcacaatcatgaaggacggcaaggaggagcaagtcacatccaacatggatggcagcagacaaagagagagggcttgtgtagggaaactcttgtttttatttatttatttattttttaatttaaaagtaaactttaatgtcaaaaatgcaaacttgaggaggccagaaagatcacacacaagactgccacttcacacttggatggttgcacagcagtccggcagaggcgctcctcacttgccagacagtgcgggggccagggagaggcactcctcacttcccagagggtggcacggccaggcagaggcgctcctcagttttcagacggtgcagccgccaggcagaggtgctcctcacttcccagacaatgcaggggccggggagaggcgctgctcacttcccagcagaggctctcctcacttcccagatggtggggccgcctagcagaggcgctcctcatttttcagacggtgcggccgccaggcagaggcactcctcacttcccagacggagacagtgtgggggccggacaagggccgaacagaggcattcctcacttcccagacggtggaaactcccgtttttaaaacatcagatctcatgagactattcactaccaggagaacagcatgggaaagacccaccaccatgattcaattacattccaccaagttcctcccacaacacatgggaattgtgggagttagaattcaagatgaggtttgggtggggacacagccaaaccatatcaacaataaacataataaatatataaatatagtatattagaagttatagtattatggggaaaaggaaaagtaccgcagggtgatgggagttatgggtaggttgcaatgttaaatagggtagtcaggataggccccaactagagggtgagatttggacaaagactgcaggtagtgaggggatgctctgtgctgggagtgtgactgagtgttgagggacagatggaagccagcgagactgcaacaagagagtgagggaagggcggtaggagatgaggtcagagaagtaaattttttcttgcttaaagtcctttaaaggcctccattgctcttaggataaagttcacaattttgacacagtccacatagtttttatgatctggcacaacttacctctccatcctcaactgccccttccctccctctcatttgcactgtctcaatcaagccataatgaacttctttcaggttttcccaatagaccaatctgtctttcacttaagagtcatcacatatactggtttcctctgccaggaatgctctgtctccctctcttcaataagctaatttccatttagctttactacgttagaaactttctgtgccttctgcaaacttaggttagacagtgaaaacacaggttccctttgtcttctaggacatctatttgacagtcctttgcatacttgggactgatacctgattaaatggttggttggttgttgtcttcctcattgtagttaatctctatgtggggtctgcccactagtttgcctttgtattggagttgctggcacatagtaggcacttaaatatttattgactactgacttagagtcaaattgagaaagcataggttttcttttccctcacttcctcctatgtgtatatgaataagaattctgccaggatagcagctttttcaacccaggtctcctttgctttttttttttttttttttttttttaagatagattctagctctgttgctcaggctggagtgcagtggctctatctcagctcactggaacctccacctcccaggtttaagaggttctcgtgcctcagcctctggaatagctgggactacaggcatgcgccgccacacctggctaatttttgtatttttggtagaggcaggctttcaccatgtgggccaggctggtctcaaactcctggcctaaagtgatccacccgccttggcctcccaaagcgctaggattacaggcatgagccaccgtgcctggcctcctttgcttttaaaaaccgtgaaattaattgctcttgtccnnnnnnnnnnnnnnnnnnnnnnnnnnnnnnnnnnnnnnnnnnnnnnnnnnnnnnnnnnnnnnnnnnnnnnnnnnnnnnnnnnnnnnnnnnnnnnnnnnnnnnnnnnnnnnnnnnnnnnnnnnnnnnnnnnnnnnnnnnnnnnnnnnnnnnnnnnnnnnnnnnnnnnnnnnnnnnnnnnnnnnnnnnnnnnnnnnnnnnnnnnnnnnnnnnnnnnnnnnnnnnnnnnnnnnnnnnnnnnnnnnnnnnnnnnnnnnnnnnnnnnnnnnnnnnnnnnnnnnnnnnnnnnnnnnnnnnnnnnnnnnnnnnnnnnnnnnnnnnnnnnnnnnnnnnnnnnnnnnnnatacaaaaaaattagccgggcgtggtagcgggcgcctgtagtcccagctactcgggaggctgaggcaggagaatggcgtgaacctgggaggcggagcttgcagtgagccaagatcgcgccactgcactccagcctgggcgacagagcgagactccgtctcaaaaaaaaaaaaaaaaaaaaaaaaaaaaaaaaaaaaaattagccaggcgtggtggcaggtgcctgtagtcccagctatgcaggaggctgaggcaagagaatggcgtgaacccgggaggcggagcttgcagtgagccgagatcgtgccactgcactccagcctgggcaacagagcaagactccgtctcaaaaaaaaaaaaaaaaaaaagtacaattagtggtttgtagggttgtcacaaacttgtgcacccatcacctttatctaattctagaacattcttatcaccccataagcatagtagccacttcccatttccccatcctatcaccacctgacaacttctaatctgttttctatctctgtagatttacctattctgaacatttcatataaatgggatcatatgataagtggtcttttgtgactggctttttttccttagcataatgttttcaacgtttatccatgtcgtagcatatatcagttcttaattcctttttattgctagataatattccattgttcaaatgtaccacattttatttatccattaatcagttaataaacatttcagttgtttccattttgattgttatgaataatactactgtgaacatttgtgtacaaggttttgtgaacatatgctttcagttctcttggttatatgcctaggaacagaattcttggatcatatggtaattatgtgtttaactttttaaggagctgccaaacagttttccaaagcagctgcaccattacatcccccgtggcaacgtataagtatgttgtaaggcctaaaattaaagcccaatatgatgtgctgcctcaacatctggcagaaatcaggaaggcctccagtcacctaagtgcaaggtctcctccttattttgctcctgtggataaggtttcctagccaaacaaccctccttagccaaagggtgaggcgctgttcttttctttgattttgtttttttagggctggggtctcactctgttgcccaggttggagtgcagtggcacaatcatagctcattgcaacctccaattcctagactcaatccttctgcctcagcctccaaagtagctgagactgtaggcgtgagccactatacccagtggcattgttctttcttagagtagcaaacttcagttccttgccagcctgtgtcattattcagacaagccaatcacatcatcccaggggagctagggggcaccccactctcttgataccataaagctgcctcccacagcccctgattgttcactgtgttttaatccagcccttccatgatgttttcctcccttggggatgtgaatacctgttactaataaactactgtcaatctcatctgtccgtgtcaggtaaactactgtcaatctcatctgtccgtgtcaatctcatctgtccgtgtttgaccatggctgcaaccgtagggcaggaattcctcccgtattagcagggtgaataggagacaatcgaaacaatgagggtttgattcttctacatccttgctaacacttgttattgtctactttattttttattatagccaccttagtggacatgaagtgacatcttgttatgttttgatttgcattctcctgatgtgggacatcttttctagtctacagccataccaccctgaatgcgcccgatctcatctgaacatattttcatgtgcttattggccgtttgtatatcttttttggagaaatggctgttcagatcctttgcccactttctaattgggtttcctgcacttttattgttgagttgtaacagatatatattttttgagtcagggtctcattctgttgcccaggctggaatgcagtggcataatcatggctcactgcagtttcagactcctgggctcaaaggatcctcctacatcagactcccaagtagctgtgactacgtgtgtgccaccatgtccagcaaatttttttttttttttagagacagggtcttactatgttgcccaggctgagctataacagttctttatatgtgctgggtattgcctcccattctgtggactgtcttttcattttctagataatgtcctttgaaacacaaacatttttaattttaaggaagtccaatttattttttctttagttgtttgtgcatttggtgtcatatctaaggtcacgaaaatttcttcttctaagggttttataattgtagcttttacatttaggactttgatgcattttgagttaatttttgtatatgatgtaaggcagggcattatggctgaatcgtgtttcccccctacccccaaaattcatatgttgaagtcgtaacccctagttactcagactgtgacagtatttggaaatagaatctttaaagaggtaattaagttaaaatgagctcattagggtgggccctagtccaatatagctagtatccttaagaggacattgggacacagacatgtatggagagaagatcatgcaaagtcacagggagaagacagccatctacaagccaaagtgtgagaagaaacaaaccctgctgacaccttgatcttagacttctagcctccagaactgtgagaaaataaatcactgttgttaagccacccagtctgattcctttttatgacagccctagcataccatacactaggggtacaccttcatcctttagcacatggctatctacttgtccccataccatttgttgaaaagactcttctttctcctttggatggtcttggcatccttgtcaaaaatcagttgaccatggacagttttatttctggagtctctattcccttatctgtgtgtctgttcttacaccagtaccacagtcttgattactctagctttgtaataagttttgagataaggaagtgtgcattctccagttttgttcttctctttcaagattgttttggctattccaggtcccttgcattttcatatgaattttaggatcagtttgtcagtttctgccaaaaaggcaataggattttaatagggattgctttgaatctctgtatccattgaggagtaatgccatctgaatgtaaaccaaaaatgaaatcctaagccccctgaccattcttttacctcagtcccttgacaagggcatctcagaggtaacctgaaaaaacaaattcagcccatgatgggggaaggtgggagtctgacatgcctcattatgccatcttcccttttggaatcaccaatagaacagacttgttaagtctgttaaacatttacaatctattctctccaagcctgctatctggaggcttcacctgcatgataaaaccatggtatccacaaccccttatcttaacccagacattcctaagtgtttagacaacaacttaactttttcaaccaattgccaataagaaaatctttgaatctacctgtgacccggaagctcccacttccccgttgtttcacctttctggaccaaaccaatgtacatcttccatggatttgattgatgtctcatgtcttcctaaaatgtataaaactaagctgttctccgaccaccttgggcacatgttttcatgatctgagggctgtgtcatgggccattggtcatttatatttggctcagcataaacctcttcaaatattttacagagcttgactcttcatcgacattaacaatattgagacttttgatccatgaacatgaggttttttcacatttatttaggtcttatttaattttttttgatgatactttgtggtttttagcatacaaaagtcttaaagcacttgaaaaaatttaattctaacttttattctgcttgatgctattgtgaattgaattgtttgttaatttcattttcactgcgtcctcattactggtatccaaaaatacaactgactttcctttttttttttttgagacggagtctcaccctgtcacccaggctgtagtgcagtggcgcaatctcggctcactgcaagctccgcctcccaggttaaatagaaccaacttatctatattgatcttataacctgcaaccttgttgaactcattttcagctttaatattcatgtatgtgtattgtgtgtttcccaagatttttgaaatacaagacgtcattgtattagtatgttttcatgcagctgataaagacatacccgagactgggcaatttacaaaaaaaaggggtttattggacttacagttccatgtggctggggaggcctcacaatcatgcctgaaggtgaaaggcacatctcacgcggctgtggcaagagagagaatgagagcaaagtgaaacaagtttccccttattaaaacatcagatttcgtgagacttattcactaccacaagaacagtatggaggaaaccacccccatgattcggttatctccacctggtccctcccacaacacatgggaattatgcgagtacaattcaagatgagatttgggtggggacacaaagccaaattgtatcagtcatcttgtagacatatttttacttcttcctttctgatttggatgcattttctttctttttcttgcctaattcctctgactaaaacctccagtactggcagaataggtaactaggcagacatgaacaggacaggagagggccctcctccccaggaatgtcaggtgaccatcaggtaatggtcatgcagttgttaaactatctaacataatggttgtagcttgcgccagggaaaggctgtctcccaatagatagaaaccacctgaagctggtgatcagcagcttcttaataagatctcaggattttgcgagtaggctcaagcatgcccaccaggaggcaaactggtggagtttaacaggtatatgaccctcctctgggaacactagtcaactggtaagggaaaaatacctcaaatgaacatgcacacaacttcagtaaacacactgtacatgtggccccaccccagggctggcaggccactgtgcatgtggacagcccaccccaagggaagaatcaggggagaagaaacacaaaccctggaatcatgccaatgtataaaaccctaagtcaagggtcagacagtatacttgaatctctcaagttgcctgcttggctcacttccaagaatactttacttcctttcattcctgctctaaaagtttttaataaattctcactcctgctcaaaaacttgccttaatctctcactctgccttatgccctcttggacaaattctttttattgaggaggcaagaatctcgagttgctgcagacctgtacagattcactgctaacagtacaatgttgaatggaagtggcaagagtaattatctttgtcttgttcctgatctcttttaccctctatcagaaaagttttttttttccttagaacttcatttctggattactactgtcaccaccattgtcactgtaaccacctgacaggtgcttcctgcccactgcacaaacaaaatcaattcatggagcattgcagtaaagaaagaggttaattgatatgaagacagccacactttgcaggtgatggaattattactcaaatcagtctcattgaaggttagggattttcccaaggtagtttggaagaaggggtggaggtggctagacaatggatacttgctgctgattggttgggggcacaatcataggggtgtggaaaacggtcatcttgtgcgctgagttgcttctgggtggggccacaggagcagttggtgggtccaggtggagccattggtgtcatgcaaaaaacctgaaaagatatcccaaaaggccattcttaggttctataatagtgatgttatctacaggagtaattgggaaagttgcatatcttgtgacctccagaataatggctgacaatcacgtccacaccatagaagaattcaagctcctctatccccctagcctggtggtctctcattagctttacaaggtcggttgagttttggggaaaggctattatcatttaaactataaactaaatgtttcccaaagttagcttggcttaagcccaggaataatgaatggcagcttgaaggctaaagccaggaggggagttggctagatgagatcaaaaagttagccgggcatggtggtgggcgcctgtagtcccagcgactccagaggctgagccaggagaatggtgtgaacccaggaggcagagcttgcagtgagccgagatcacgccactgcactccagcctgggcgacagagcaagactccgtctcaaaaaaaaaagaaagaaaagcaaaagaccttgaaactggaaaatggatttcagttctccctagtctttgatgtaccaacttgggttaaaagttcttgtttctgtgtttgaagatagtgacttaaggaagaactgaagttgggaatgtagtttctgtagttaatattcatgttacaaaaatagaagtctaaacacctgaaaaaaagaatgaaacaactcataaactttttttttggatttgcaatgattttgtacattccattagttttgtaactttcatgaaggaatgcctattgtcctgttggtggcagtaaaacaccactcctggatcatttgttacttgaatatttcatttgtttgtttttaactttctctagtgcatcttcagtttgatgataggttagtttcaagatgctatctagtaaatgctaaaacaaaccaacaaacacaaatactgggcttctaattaggatactcaaggaattttaaagttttagagtttcagaaataatacattttatgaaacagggatctgtatcaggaaaaaatgtatatcatcacagtaccatgcacatattatataataccttaaatttgttgaagcaatttctcattacttatttctcatgaaacaatccaaaatatcaagaagggaagacagttgaataaacacaccatttccaagtagtcagtgattaaattgaacttaatgtaccctaagaaatacaagctcccttgacagagaacaaacagaacaaaaaaatccagtttcctccttgttctatttttgtgagcaaaataagtactcatttaagcttccatcccttttacttaaaaatccctctctgtcttcatcctcttctgctttgctcttgtctttaatgaaggtctgttctgcccccattccaaggctaacttcctcactatgtccttggtcccatctttcctgtctctctttggagaagcctgtgatggttagttagttcacttattcaacagatattcactattgacagtccctgggttagatgtcaggggatacagagatgacattctgtgtcctgaagttgtcacatctaataggggaggcacacagacataagaattcagtgtgtttgatcctggggtttaaaagggatctttgggagcctaaaggcagaatgccaaattcattctgggaaactagtaaacattttccaaaggtggcatctaacctgagaataggacatgagggtgagagtgaacagcatgtagaagaggaatgaggaagaatggctgaggcaagtcctttgccatggcacatttgagggggatgcgcaggatacgattctgaggggctttaattacatttctgccatcaatttattgtggaattttaatcaaatcatctaaccttttaacacttaatttcctaacttataaaataaagagacagggaagcatgctctaaatttatgtcatgccagctgtgtcaatctgtgctataggtgtgtgtatatgtgtgtatgtttgtatgtcttatataaccatttcagtcctttaatgagtagataagaatctttgtataatttgcatgtttgttgtttaagtgcttggctaaatttatctttgcctcttttacaaaaaaaaaagtgtttacagaacaatataataaaattaggagcaaaggaatattttatttgttatacttcaagatgaataccaccaaaatgttttcatttcaacttaaaaatctctttataaccatacttgaatataaacaacccatttgttctacattagtgaaatgttagtgtgtgtattttctagcactcacacctctgcactgtgatcattctatcaggtatttctagatatccaagcaatgtgttggatctatgtaaaaaaaatctgacagctaccatcaataacaatataattgtgtagcatttaaacagtttgtaatgagctctcaaatgcattttttaaatgtttaataaataaaattaatagtaagacacctatcatttattgagcacttaaaatgtgtctgatgctgtgctaagcactttaaaactaatcttcacggccgggcacattggcccacgcctataatcccagcactttggaaggccgaggcaggtggatcacgaggtcagaagttcaagaccagcctggccaagatggtgaaaccccatctctactaaaaatacaaaaaattagccgggcctggtggtgggtgcctgtaatcccagctactcgagaggctgaggcaaagaattgcttgaagccgggaggcagaggttgcagtgagctgagatcacgccactgcactacagcctggacgacagagtcagactgtctcaaaaaaaaacaaaaaacaaaacaaaaaaaaataactaatcttcactacctttaattttgtttattgtagtataatatacgtaacataaaatgtacaattttggtcagggcagtggctcaggcctgtaatcccagcactttgggaggccaaggtgggtggatcacctgaggtcaggagttcgagatcaccctggccaacatggagaaaccccatttctactaaaaatacaaaattagcgggtgttgtggcgtgtgcctggctactcaggagactgagatgggagaatcgcttgaacccgggaggcggagcttgtggtgagctgagatcgcaccactgcactccagcctgggcaacagagcaagactccatctcaaaaaaaaaaaaaaaaaaaaaaagtacagttttaaccattcctaagtacacagttcagtgacattaggtaaattgacattgttgtgcaactatcaccaccatccatctccagatctttttttcatcttgcaaaactgaaactcttgcacctgttaaatagtaactccccattcctttctccccttagcccctggcagtcaccattctgctttctgtctctatgaatttggctactctaggtacctcatgtaagtggaattatatcgtatttgtcttatctctggcatatttcacttagcatagtgtatgacccttaatttttttactgacattaattaaaagaaatcctaattttaacaataattctattactgttaatattgtattactattttatcagtgattctattactgttaatactgtattgacttgttggtatgaatcaatatgctcattttacagattaggaaactaagacttataaaaagttaaaaaacttggttaaagtcattcagttaggcaaatgacataccacaatcacaactaggcctgtcttactacagaggcagtgttcttaacttctaagctatggggtgtgtgtgtgtgtgtgtgtgtgtgtgtgtgtgtgtgtttattttaaaccttacaattgctctgtgaacaagagattatatcctacttgatactcaaatcccaggcatggcgacatatgcctgtaatcctagctacttggaaggctaaggtggaaagatcacttgagcccatgagtgcaagactaatctgaacaacatagtgagacccgttatctaaaaagtaataaacaaataaataaataaaagccaggtggctctcactaaaaattccatgcctttttacgttatacagcaggagacccttaaattatagtgaaatcagtctccattccacaaaactatgttgacatcatactatgagtgaaaacaggttttttaattcaagttgtttgaattaagcatattctattgtatgttcaaagatagttgtcccaatttaaaaatgtccttggttgaataggatagaagcagagccagagcaaccaagagccattgctatatgaacaaataattgaatttaggctaatgaaaatgaactcactgtcaaaaatcatcatgaaattaaaatattctctgctcttgactggctggaataatatttgattcctgagttctgcctttccacttattctgtcataatctttgagatatatgaagtcatccctgaatactgtttaatgctctggttaaactccatttcactctgaccaatcagagtatgtgagctgatcataaggagctattatcaagagacttgtcagaggattcactgcccaatatgtttttatgaccctttttatctgtaagagttgctggtattgctttttagaatgaaatagactaattttgtccattacagtgttgatagtttgataactcactgtgggaatcaattgatcttatcagaataatataaccagtagaggaaatgtaactgaagcatatacagttttatttaatatattgtttatgcaggttgagaaaaggctgaaatatgctccttttgctagaaatgtaataactaaaacgcccatagccttgatcttttttatcttttattgcttttccttgactaagagaatttggttttggtaaagctaaatgaatttagaataaagtcatttatttgtgtcatacgtaagcttgattaagaaggtttttatggccaagagccatggctcatgcctgtaatcccagcactttgagaagctgaggcaggaggatcacatgagtcttggagttcaaaaccagcctgggcaacatagtgagatcttgtctctacaaaaaataaaaataaaaaaaatatcaaggcatagtggcctggcattgcactccggtgatcacaccattgcactccagccctgggtgacagagtgagatcctgtctcaaaaaaacaaaggaagattttttttttttctatttagaaagagagtgcataaaagagaaaccataggcagggacagtacctcatgcctgtaatctcagcactttggcagggcaaggcaagcggatcgcttgagtctaggagtttgagagaagcctgggcaacatagagagacctcatctctccaaaaaatacaaaaattagccaggcacgatggcacgtgcctgtagtctcagttatttgggaggctgagatgggaggatcacttgggcctgaggggttgaggctgcagtgagccatgattgtgcactgcactccagtatgggcaacagagcaagaccctgtctcagaaaaagaaagaaaccataaaaagtataatggcttgaaaaagatggtgtatttctcccacagatattaatctagagagaaaatgactggccccaaaaggcagatagctcagttacataagatcactcaaggactcaggttctataatgaatttgttcaattatctcttaggatgttgtcctcatgtacatggttaaagtcagacacatctttcaattcggaggaagagggaaatttcaagcaaaagtggagggaaggcaatttccttttaagcaaatagtgaggaagttgcatacatcacttttattcacattccattgacaaaaattttgtccatggccacacttagctgcaagggaactaggaaataattgtctgaaactcagcagccatgtgccgtgttaaaattattatatttatggaaccaggagaaaactttttttttttttttgagactgagtttcgttcttgttgcccaggctggagtgcaatggtgtgatctcagttcactacaacctccacctcccaggttcaagagattctcctgcctcagcctcccgagtagctgggattacaggcagactccaccacgcctggctaattttgtgtttttagtagagacagggtttcaccatgttggtcaggctggtctcgaactcccgacctcaggagatccgcccaccttggcctcctaaagtgctgggattacagacgtgagccactgtgcctggccgggagaaaactttttaagaaaacaatcagcagtctatatagtctaccctactgacctttcagtgtctgtgattacctatattctcacacatagacactccctctctcccaagggagacattccaaggctcccttggattagttcatctgctcaaagtcaagaatacccggatggtgcacattcctgattttcaggtctgtgatggtccctcaaagttcactaatgtgttttctgttcatctcacatccagtatacaaaagtggtaggaaaaatataactgcaataaaagctgtcattcagaagatggaagaatgggaaacatgtcacagtcagtccgtaggaatttccaagattcttgctatttcagtagaggagatttcttggttagcctgtgtagctgtcccctggttctaatttctaagaactacaccattttccattgtcctccatggccatatctaaagttggtgttagaggccaggcgtggtggctcacacctgtaatcccagcactttgggaggccaaggcaggcagataacttgagatcaggagttcaagatcagcctggccaacatggtgaaaccccttctctactaaaagtataaaaaaaaattagctgggtgtggtggcaggtgcctgtaatcccagctactcgggaggctgaggcaggagaattgcttgaaccccggtgggtggaggttgcagtgggctgagattacaccactgcactccagcctggacaaaacaatgagacttcatctcaaaaaataaaaaaaaaataataataaagttggtattagagaatagtacatcctcctagggagctgcacactttcaaaaacttgctacttgtggagatttggaagcccaagagttgtgttagtgatcaaacaaatgactcttttttaggccaattttgatttcttttgggaaataattctctgaatacttttgtcgacttgtggtctttttgcttgcattcagttccttctgagtaaacaggtctaaagatttcttctagacatagttcctaaatcttctcatttatttgtttacctgtttgcatttaatggcccatcctttttccctccattttaatggtggttaccctgaggctagctaaaatcacaaactggagtcagaaggcaataccattaatttgatctttgcctgttagctggctgtatgttttggctgagaagtcttaatgagaggtacttaggaaaaatgtagagccttttaaatccttctgtttggggacaagtagtttgattttctaatcctgtatccttaaattactgtacttaatcagtttagattgtagaccatgttctctgaagtgacaggtattataggcacacagtctgccttccaagttatcaaaggcagtagttttactaaatattgtgacatgacataaaaaggatcattagttttccagactgcaatattggttttttcaccttgatctttactcagccacaaagccaagaaacatatttgacgttttaagtttttattttggcagtaaatcaattctggttacctatcccaaaatataataccttaaataagaattttttttctttttatgtgatggtatgtggagatagcacatggtccagacctttatgcatctcagctccatgagatcattcacagacttgtgttcttttcatcctgttgttctgcagcagtatttctcatgctcagaactattggcattttggggcagttaattctttgttataggtggctgtcatgtgcattacaggatgttcaacagtacgcctcatctctacaggatgcccataggacatgctcagttgagacaaacaacatctgcagacattgcccaatgttcccctgggggcaaaatcacccctggttgagcatcattgctttatagttgcctaggatctcatcgtcatctgcatgatcaaagcagattttgatccataatgaagagaaaaatcaatcattcgaaatcactctagattttataattggcagacaaaaacattaatactgtaactttattccatatgttcaaaaaaataagtaaagaaatgcaagatatttaaaaagaaccaaattaaactttaagagataaaaattacaatgtctgatagaactaagaaatacattgaataggatgaagggcagatgggacattgcagaagaaaagattagtgaacttgaaaacatagcaattgaaactattcaaaattcaatacaaagaaaaagcaaatttaaaaaaaggcagaaaggagcatcagtgagctgtgaaatccttcaaaaggcctaatgaatgtgtaattggaggacctgaaggaaaggatgggagtgaatggtgggcaaaaagcacttgaagaaataatggctgatatttttccaaatttgatgaaaatttttccaaatttgatgaaaattatagacccaagaagtttagtgaattccaagcaaaagaaatatgaagaaaactacatcaaggcgtgttatgatgaaattgctcaaaaccagtgataaaggtaaaatcttaaaaagcatccaaaggaaaaaagataatatgcgtaaagaaacaaagaaaagtatatcagcagatttctccttagaaacagtgccagcaataagacagtgggaccacatgttaaaaatactaagcaaaacaaaacaaatgcaaaaatgtctctcaaaaactaagatgaaatgcttttatagacatacaaaagctaaaagaattcatcactaggagatctggattactgaaaatgttaaaggaagtcctaaggaagaagcaaaataatacttcacagaaatatgaatctgctctatgcaaaagaattggggagcgtggcaaatggtacctatgtgggtaaaaatgtaataagagtacaattctgtattcttcaggtcctttctttgcttatcactttggtgggtttctcttcctctgtagctttcaacaataagtccttgaaccttctgcattttttttttaagtcagagtctcacactgtcaccgaggctggagtgtaatggcgtgatctcagctcactgcaatctccgcctcctgggttcaagcgattctcctgcctcagcctcccgagtagctggaattacaggtgcctgccaccatgcccggctaattttttgtatttttagtagagatggggtttcactatgttggccaggcttgtctcaaactcctgaccttgtgatccacccaccttagcctcccaaagtgctgggattacaggagtgagccactgcacccggccaccttctgcatttttatattgcattattgcctttggagaagtcgtaaatacacttttcaaaaaaagtaatttctaatttttgtcctaacccaacttccaatttaataactgtagtgattctatataaaatcttcagtgggccaggcaacttgtgtacagcacaacttcagggataccattcccatagactatgattgcacatctgtacatcatgtttctgattataacactgcattcaccttttcactctcccatcaaaagtatttgagttgaacttgagtactgtttcctaaaaacatctttatctcatatatcatctccccttttctttgtataatactgagccttcctagcccttatgttgtggcttaaaccccaccttctttaaaggatgattctaaactctttctgcccaaaatgaacatctactgtgattataccatgtgtcattcattatgacaccaaaatgccatcttgttgttatttagatgttttgtatgtgtatgtcttgtcttgaattcttcaattaaactgtttattttttaaagacagtgtgaggctgtttatcccctaggagagcaagtgaagttctgcatgttcagcaagcatccctaatcccagaattgatgcataaagtagcaaaaggccaaaggattattaaccttatgttttttccagttgttctatttaagcaaactacaccccatctaaaacaaggtttgaagtagtttggacttttccctaaagatttgatttctgcttggttttgaagttttgtattagaaagaaatcatactaacccttacttcatttgattaatatttgttaattgtttatatggtaaatacaggtctcttcacatagattatgtatactgaactcctttcttttgaatacaaaagccccatatttcccaaatttagtttttatttaaacaatcatatcctggatcacctgaggtcaggagtttgagaccagcctgaccaacatggtgaaactccatctctactaaaaatacaaaaattagcttggtgtggtgggaggcacctgtaaaaccagctacttgggaggctgaggcaggagaattgcttgagcccaggagggggagattgcagtgagccgagatagtgccactgcattccagcctgggaaacaagagtgaaactccatctcacaataaataaataaataaataaataaataaataaattaattaattaattaaataagccctaattaaaatttccctcagtattaccagtgttgggtatggcctcacattgtttccatcctgcttttcccatatttaataggccctcactgactcctgaatattgaaaattgagttcaaatacatagtttattcctcgaaatcctccctccatactctgctcagatggatgattccaacctcaccatggatctctgctctacctaaactggaagtggactcaagattagccacacataccttacgcttgcctgctttctgtctgggaataggcttcctccagccttcctaaatctcatgtttttcaagtctagctcctatctaacccctgatcatcagttaccttcctctatttttacattatcatcctaaatagagataactcacagggaatactgttgtattatagtttacttgctaaagtacatgcttttgatatatatatatatttttattatactttaagttctagggtacatgtgcacaacgtgcaggtttgttacatatgtatacatgtgccatgttggtgtgctgcacccattaactcgtcatttacattaggtatatctcctaatgctatccctcccccccacccccccaccccacaacagtccccggtgtgtgatgttccccttcttgtgtccaagtgttctcattgttcagttcccacctgtgagtgagaacatgcggtgtttggttttttgttcttgcgatagtttgctgagaatgatggtttccagcttcatccatgtccctacaaaggacatgaactcatcctttttatggctgcatagtattccatggtgtatatgtgccacattttcttaatgcagtctatcattgttggacatttgggttggttccaagtctttgctattgtgagtagtactgcaataaacatacatgtgcatgtatccttatagcagcatgatttatattcctttgggtatatacccagtaatgggatggctgggtcaaatggtatttctagttctagatccctgaggaatcgccacactgacttccacaatggttgaactagtttacagtcccaccaacactgtaaaaatgttcctatttctccacatcctctccagcacctgttgtttcctgactttttaatgatcgccattctaactggtgtgagatgatatctcattgtggttttgatttgcatttctctgatggccagtgatgatgagcattttttcatgtgtctgttggctacataaatgtcttcttttgagaagtgtctcttcatatccttcacccactttttgatggggctgtttttttcttgtaaatttgtttgagttctttgtagattctggatattagtcctgtgtcagatgagtagattgcaaaaattttctcccattctgtaggttgcctgttcactctgatggtggtttcttttgctgtgcagaagctctttagtttaattagatcccatctgtcaattttggcttttgttgccattgcttgtggtgttttagacatgaagtccttgcccatgcttatgtcctgaatggtattggctaggttttcttctatggtttttatggttttaggtctaatatttaagtctttaatccatcttgaattaatttttgtataaggtataaggaagggatccagtttcaggtttctacatatggctagccagttttcccagcaccatttgttaaatgggaatcctttccccatttcttgtttttctcaggtttgtcaaagatcagatggttgtagatgtgtggtcttatttctaagggctctgttctgttccattggtctgtatctctgttttggtaccagtaccatgctgttttggttactgtagccttgtaatataatttgaagtaaggtagcgtgatgcctccagctttgttcttttggcttaggattgacttggcaatgcgggctcttttttggttgcatatgaactttaaagtagttttttccaattctgtgaagaaagtcattggtagcttgatggggatggcactgaatctataaattaccttgggcagtatggccattttcatgatattgattcttcctatccctgagcatggaatgttcctccattcgtttgtgccctcttttatttcattgagcagtggtttgcagttctccttgaagaggtccttcacatcccttgtaagttggattcctaggtattttattctctttgaagcaattgtgaatgggaattcactcatgatttggctctctgtttgtctgttattggtgtataagaatacttgtgatttttgtacattgattttgtatcctgagactttgctgaagttgcttatcagcttaaggagattttgggctgagacgatggggttttctagatatacagtcatgtcatctgcaaacagggacctgctttacttaaatgctgtgtaaagaatttggtggaagctctttgaaatttttcttcatttgttactcttctctggaggagctctgcatttccgcatgggatgtcagtttgcatcacagtagagaatggacattttgtgggtaccgtggattgagctagtggtattgagagacaggactaagctggatttcctaggccgactaagaattcctaaacctagctgtggacggtgaccacacccacctttaaacacggggcttgtaactcagctcacacctgaccaatcaggtagtaaagagggctcactaaaatgcaaattaggctaaaaacaggaggcaaagaagtagtcaaatcatctatcatctgagagcacagggtgagggacaatgattgggatataaaccccaggcattccggagctgggatcgggcaaccccctttgggtcccctcccattgtatgggagctctgttttcactctattaaatcttgcaactgcacactcttttggtccatgtttgttctggctggagctgagcttttgctcaccgttcatcactgctgaatgctaccatcgcagacccaccgttgacttccagccctctggatcctgcagggtgtccgctgcactcctgatctagtgaggcgcccattgcccctcctgatggggctaaaggctcgccattgttcctgcgtggctaaatgcccaggtttgtcctattctagccaaacactagtcgctgggttcaacggttctattccgtgactcacggcttctaatagagctataacaccgcatggcccaaggttccattccttggaatctgtaaggccaagaaccccaggccggagaacaaaaggcttcctaccatgttgggagcagccgtcaccatcttgggagctctaagaacaaagacccaccctgcccccgccgcccgtaacagtatgagggagtaccagataagaaatctaaatacattcctaggtcttcctgagctagttcttttttgtaatgacttcattattcaagttaatgcctaatacctaagagatattcaaatagaattgcgacaacttactcaaatctgtattcatcttcaatttgaaattagtactgccattctctgttgataattgagaggttactgaacatctttgcatctttgatatgttttcttcttcttcttctttttttttttttttttttttgagatggagcctcactctgccgccaggctggagtgcagtggcgtgatcccaggtcactgcaacctccacctcgcgagttcaagtgattctcctgcctcagtctccctagtggctgggactacaggcgcacgccaccatgcctagctaattttttttatctttactagagaaggggtttcaccatattggccaggatggtctccatctcatgacctcatgatcctcccgcctcgccctcctagagtgctgagattacaggccgtgagtttttcttcttcttcttctttttttttttttttttttttttttgagacagagtctggcttgtcacccaggctggagtgcagtggtgcgatctcggctcgctacaagctccgcctcccgggttcaggccattctcccgcctcagcctcccgagtagctgggactacaggcacccgccatcacgcccggccaattttttgtatttttagtagtgacggagtttcaccgtgttagccaggatggtcttgatcttctgacctcgtgatccgcccacctcggctcccgaaagtgctgggattacaggcttgagccaccgcgcctggactcagtttttcttcttttatttggataactatagatttacctacttattctctattcttccttctctttagtgctctgttgtcaatttattatgtttatcttatctcagatttcttttctttcttttatatgaccagtgtgcaatccctcctatattgtggtgggaggtgggagaggtttaccccagcaagcgtgggactggtagtggaaacatcttctacccagacatggtaatgttttattttgtaaaggttgagttgagtagatgaactgaaggaggtaactgagacaagtgtgggccatcaagcaagactggcctgaggggcatgtcaggaatcggagtacaaagccaagaatagaccaaactgcaggaaagcaaaagcaaaatcaaaatgagtgtaaaggaaggcagcctagaaatgggggtaagggtagtgtgtggagagcaacgtgggtgtttacctggtactaggcttttacatgttctacaagcccttgcatggttgaggaagctccattttgaagaatcagtattggagcagaagccaccagtcagtttcttcttgattattaaatcataagcaactcctccttaattaaaaagtaatgaaagatggcatattttaaataggacccattgtattctcagtagcatttaaatgaaaaggtatgttttgggggtgagaatatactacagtatttcacaatacaatatttccatatgagtgattttattttatttttttatttttgtttttatttttgagacagagtttcactcttgttgcccaggctggagtacaatggcgcaatctcggctcactgcaacctctgcctgccgggttcaagcaattctcctgcctcagcctcctgagtagctgggattacaggcatgcgccgccaatcacaactaattttgtatttttagtagagacagggtttcactgtgttggccaggctggtctcaaactcctgacctcagatgatccacccatttcagcctcccaaagtgctgggattacaggcgtgagccactgcactcaccctgagtgattttaaaatagagaattgtcttgttctgagattaaggttagcttatcgttcagctactgtttcagtaaaataaataattccagtaaaggaacgataattgtagttatcttggcttggtatattatgctatggttaggcaattttagagtaaagagaagaaatcaaaagctcttgcttagcacacttgctgcttaggcattcttgttggaaaataatgcgttctcatttcagagcaaagacagcaaagctgactctggtatttggagagctaaaggagtgaaacttcttttaagaacgggaccattcgagccctgtaggagcttttgagcatgcgtattcaactgctcactctcatgtctataacccacgctgcttctccaccgttatgtgcagaccataagccctacagtggtgacagctgcttttaggcccctttgccttaaatacagtagaatgcttatatattagacttttagttcttgaattttggctagatatttcaactttcatttaaatgttgtaacatcccatgatcagagcattataacctggagtatcactgataggaaagaaatagtaaaaaaaagtatgtaaatatgtaaatgtaaacataaatggaaatttgaactcagttatttgactaatgtgtgtataccatctggctaactccatttcaaacaccttatgcatttacttgtagtttttatcttctctaaatataataacttgtagaggaggagtgtggaagagtcttccatttaccaaagtgatttctgtgtcattttcttgagtttgatttcagtcttgtgactggtaaattctaagtatctgcccttttgagcaaataaacttgtcaatcagatattttctaaaggggatattttttgttaatattagtttaggttcatgtggacattgtttaaaaagctttgggaactttaatgattggattttataacactttattagttatagccaactatgttactacttccatcaacacccatactctgtttctttgtgaaatgaaaaatattgttttatttgacactctcctccttattatattgtacacagtaaaatccaaatggaagccaataacttctgaactctaattgtgtccatcctgtaaagcatatgggtttgttcactgattcacttccagagaactaggtcatcatcatgagaacccccacattccccaaatcaaatttacatgttcttgaaggaacaccaaatggtaatgagtactttgctaaataacgttgacctttatttattttcttatggattttatgctgctttactatgtgtcagtatccctcccttcttttagaaatccataaacattgcacttgctttcattttgaactttcttcttactaatttagacattaaataaaagagacatatatgcttattatcccctagtttaatatatatattttaaaaagttaagctgatattttaattttatttcttcacgtgagcatcatttattcatttgttcatttactcaatatgtatttaaatgatctctgaccacagtgactaaaaactgttgggtactagaggtgcgaaaatgaatatgttgtgtggttaatctcagagtttcactgggaagtaggggagacagacgtgcctacaaataattgtcgtagaagagttgttattgtagggtcataaatgggacaggatgcaaaggcagaggagggaagtaatgacagggatgacttgaaagagaaagtgaggctggacatagtggctcacacctgtaatcccagcactttgggaggccgaggtgggtggatcacctgaggtcaggagttccagaccagcctggccaacatggtgaaaccctgtctctactaaaaaaacaaaaatgaaccgggcgtggtggtgtgtgcctgtaatcccagctacttgggaggctgaggcaggagaatcgcttgaacctgggaggtggagattgcagtgagctgacattgcaccattgcactctggcctgggtgacagagcgagactctgtgtcaaaaaaaaaaaaaaaaataagagaaagtgacatctgactcttgaaagattagcaagacaaaacaaggaatgatgttttagacaacaagaacaatatatgtagataagaaaagcataatttttaaaaagcatatttgggaaataatgagaagtttcatgaggacattgggcatgaggggtcaaggtgacagatgcaattggaaaggtaggatagatctagcttgtctgaaggatgtcttgtgctttgaacctgtggaccagaggatatggatactttcagacaattgcatgatcaaatgttttgttttaggaagataatttggaggcgaaaagactgaaatgtgaaggtactggtaatacatatggagaatagttaggatactattagaatagtctgggggagaaataatgaaggcttctttaaccaaggctgcaacaataggggtgtagaggggcaaactgagcagcatttcccaggtactgtagggaacttgggtacagttggatatgtgagacaacgaatagtgagtcattactatcctccacttttcttttatcttccttttaaaaacttccctgtcctggtctctctttaattttaaggaaaagagctgctaaaatgtgtgctttatagagaaagaagcttactagaccttacatgttctcacttatggcatttagtgataaccagggtgtccctaagcaattgaatagtgataccagaccagcttctgcatggtacagctttaatgtattattgtttgaacttcattaataattagacttgcgacgaaagtaaccagttcaagtgatcttataatcaactttgtgcctcagcacctggaactttgagagagccactgtgttcatttatcaggaggcattctgcttcctctgtggtgtgccattccctgacttggtaaagaatattgtctctctggcagttttgtattagtgagttatacaaaggaggtcatagcaaaccacctgtactttagaaagttaacacagaaacactgaagaggtatttcttctttgtggtacttcttatattcaagcttggctctatttccgtagcacaccagtccaggctctcattttctcacattcgattgactacaagagctttctgacttgtctaccttcagtctcttcctctcttaagctgtcctgccctctgctattagattaatctttctaaaaggtaatcttcgtagcattcctcacctacttgttgtccagtacccatctttttggaattccattttcatcataatttggcctcagatgtacttactggcctcaaatgtacctattggacacattgggatgaagtcttgttctgttgcccaggctggagtgcaatggcatgatctcggcttactggaacctccatctcccaggttccagtgatccttgtgcctcagcctcctgtgtagctggaatcacaggcgtgcaccaccacaactggctaatttttttgtatttttagtagagatagggtttcaccatgttgcctaggctgttctcgaactcctgagctcaggccatcctctctcttcagccacccaaagtgctgggggttcaggtgtgagccactgcagtcagcctgttttatgcttttaagtttcttctctttcctgaagtagttgactgttacataacatgtattatccaaagttcacaggatactctaaataccaatattatgatatccttatttttaaatatagaaacctttctcctcttaccaaaaaccacagtgactcagctacttgcatgtctaaaatggtctctgcatttttctgtggctagtctttatgatggttatagatcagtaatagcctttttggaagcataatattatgtattaatcatggcattcttaaggaatcactgcaattaaccaggtagaccaatttagttggaccgtggtctgtttttttagtatgtaaaaacatgggttcaggggattaaaacaactcaacattcatgaagaatatattttcagatgctcttacattccctgatttttcaatactgctacgatttttttttacagagtttctttacttatgaaattgatataaaataactgccttgtcataagaatgtataataactgagaagggcaaagactgtaagctaaatttactcagcatctgctacatgggagtgactcagttcattgctcagcaaacccacaagttactgtgttgtgtctctgtggggtctcctggggagaacagaaacaataaatgttaaatctgtaaatgtgtcaaggggtcactgtggttgactcttggttgctaaaggaaacagaggttctaaggccctgtaaaattataatatttcaaagtgaaaatgaatgaattaatagaagaagctgagacaaggatcttattttgtgtttgttttcctctcaatacccttgccaattaacattttttgaatctcttgctcttctccactgtaagcctgccctgatattttctaattggatacagagataatacataactggccaggtgtggtggctcatgacagtaatcttggcactttgggaggctgaggtgtgcagagcactggaggccaggagttcaagaccagcctggccaacatagtgaaaccccatctctactaaaaatacaaaaaaattagctggctgtggtggctcacacctgtggttccagctgcacaggaggctgagacacgaggataactgaaacctgggaagcagaggttgcagtgagccgagatcatgccactgcattccagtctgggagacagagcaagactttgtctcaaaaaaaaaaaagagaatacgtaacaaagaagtaagaaaacaatttcaagtggtgataaatgtcataaaagaaataatacaaattttttactgcccttcattagataaagatagtaagagagaaggcctctgggccgggcacggtggctaatgcctgtaatcctagcactttgggaggccaaggtgggtagatcacctgaggtcaggagttcgagaccagcctgaccaacatggtgaaaccccgtctctactaaaaatacaaaattagccaggcatgatggctggctatttttgaatgccagtaatcctagctactcagtaggcggagtcaggagaatcgcttgaacccaggaggcagaggttgcagtgagccaagattgcgctattgcactctagcctgggcgacaaaagtgaaaaaaaaaaaagaaaagagaaagcctctgtgagcaaaatgacattggaattgaatgatgcagtagagctagccatatgaagattggcggcaaaaacggtgcagaggcccttctgaaattctgctgcatctatttgaagccatgagtgtgtgtgtgtgtgtgtgggcagggggcggggggtatgtgtttatgtatggtgggagagctagagtgggaggaggctgtgcaatctattaccacctttgtttcacaacatggacttgtccatttcaagaaaaaaaaaatgaggctgagcgtggtggcttacacctgtaatcccagcactttgggaggctgaggtgggtggatcacttgaggtcaggagttcgagaccagcctggccaacatggtgaaaccccgtctctactaaaaatacaaaaattagcctggcgtgctggcacgtgcctgtaatctcagctacttgggaggctgagacaggagaattgcttgaacccaggaggcagaggttgcagtgagccaagatcgtgccattgcactccagcctgggtgaagaagagagactccatctcaaaaaaaaaaaaagaaaaaaaaatgaatgtccctatcttgacatattaattttgtagaaataaattcacttgctaatacatgggttggcccatataactcctccattgaaaatattattttttacagtgacagctgttaaacatatacctaacattctatgtaatatgaagatgaagatgttagagattgcaaatttaatagggaattggagatggaccataggaagaaggtagagacaattcacaacttactaggatgagtacaacacctcattattttttaacagcaatgacaatacacacacataaagataaaaaaatgctggtctagcttgagaggatcagggaatagtctagattctatacacgataattttaatctgatcaattcaaaatttaaaaacaggcttctgctaacatatgtttataccttctgcttaagcttgaaaataaatatgagctttatccacactgtccaggaaaggggatgaacgaactgagatagcattccattttcaagcctgtgccactaacatggcttcaagaaagcagctcttacagagacgctgtggctgagctgccaaggatgtagctccttgaactgttcatctggaaaagagagtgcttatcagttaaaaattgagaaggcagatgtgctttattataacaactgtgtgtttagaagtgacagttctcagggcagacttgtggataccccttctcaactcaacctaagaatcttagattctttcttaccagatggcaggctcaggttcctgaccagttccacgtggaataaagtggtgaagcataatctttctaataagataggttctttatgggatacattacttgaaagaccagattacagtgcaggaaatgctaggttccctgccgtgcatctgtgctctgaatatcttggcttcctgactctgcctctgacaagttttatgatgatgagcagtcacttatctactgcctcagtcttttcaacaggataaacatgttagaccttggtgttttctagggtccaacaaggtttcattactttattattctgttatatctagagtatctgtttcagtttgggcagccctatgagagatactgtccaaagtgtgttcttgaagtagcaagcatgattgtgaatagtctagaatggtccagaaaccacctcataggagacccagtttgcagcagggatgattagcttagagaaaagaaaattaagactgtctttgaatattttaattaacgtcacgtggaaaaaaagaagtagacttagtctgtgttgctgtaaaatatttaattgaggtgactcttataggaagtgctctaaccacaaaaggaaaaacaaaacaaagggaacaggaggaaatttttagagatgatggataagtttacggcactgatagtgataatggtttcacaagtgtatacttatggcaaagtacatcaaattatacatataaaatatctacaactttctgtatgtcagccatactcaataaagcaactaaaactatatataactgagcctagttactagaagtttcagatgtctggcttactatgtacagtatagccctttcctaaatgtccagtaataagataagcagcctattgagctacatgtcaataatgacacagaagtagaaacaggccagtgcggtggctcacgcctataatcctagcactttgggaagccaaggcgggtggatcatctgaggtcaggagttcgagaccagcctgaccaacatggtgaaaccccgtctctactgaaaatacaaaattagcagggtgtggtggcgagcacctgtaatcccggctacttgggaggctgaggcaggagaatcacttgaactcaggaggcagaggttgcagtgagccaagattatgccactgcactccagcctggttaacaagagcgaaactccatctccaaaaaaaaagaaaaaaagaaaaagataaagaaaaaccaagtagaaacaaaatgactctctacagaccataagacattcttacattaataaaggcattacagtagaatctgatcacaaggattggcaataggtattagtgatgctaccaagactattcagaatgttattaaattgcttttggtaggggaaagttctcctttctatttaaaaacaaaaaaccttctttaacagttatgccttaaattttacaaggttagagcattcctaaaaagctaggtaagtctacaatattttacagagatgctataaacatgtgacctcaaccacctaccaaaatgtcaggtaactgcacagtatcttctatattgtactctaattcttcgatgtttgagttccaactataaaataatgagactcatttccctgtgatataacttgtaagctcagtctcattacatttcattttagcttttaagtagcttgaataatccttaaagttagaaagcagcatctgatctgtctttctatatccagaagcatatagtacagtgttgagcaaaatcaagacttttttttttttgagatggattttcactgtgtcacccaggctggagtgcagtgtcatgatcttggctcactgcaacctctgcctcccaggttcaagtgattctcctgcttcagcctctccagtagctgggattacaggtatgcaaccaccacacccagctaatttttgtatttttagtagagacaggtttatgatatgttggccaggttggtctcaaactcctgacctcaagcgatccgcccacctcggcctcccaaagtgctgcgattacaggtgtgagccaccatgcccggcccagaatcaagacttgaatgaaagaaagagtgtgatttgtgcaggattttacactaccacgatggcaccactactcactgtgtcatctgtattttgacctgtttgctggatcttaggaacttgcaaaatcattgaaggttcatctttttaaaaattgtcaatcaggcaaagaatagctagagaattaggttttgctctcctagtcaagaagggcatggatcctttgctacttattgatgtgtctgtgtcttagtgaaccgaagaggcaggtgatctgacaggaatgtcttttcagtgtttgactaactctctttctattgtgaatatatccaaagttctttttgtctttctaaaccctaacccagataaacgcaatgtatttttacacattttcttttcttctatgtgatttcctggaaagaatgaaaaaaactactagttgttgagcacctaccatgtgctaggctctacgagaggttcctttgtatgcattaatttattaaattttcagagcagctttgccagctaggtgatgttgccatacagaagctcagagggctaagtaacttattcatgtcatacagctagtaaatgtgactaaaagatgatgtaataagcaatgccctgttttggtcttagagatatatttaattatcattactcttggatttttgtctaggcccatcccagtagtataaacccacttttgtctgcatctactgtggacaacaaagacatacctacctcatagcacacagtgtgtcaccccttttatagtgtccatcacaccctactttatctttgtatttggatacctccctgattttaagctcctgcaggtcagaaggtgtttcctttttcatttttgtaactactgaaataactacctagcatgttttgttacattcagttttcttaattataggtccatgaattaagtcaaatgtgcttttcattttacaatggaaatctatatgtgtcctgaatatgtctgataaccatgacacagtggagtggttcaggaagagcattctcaagtgcaaggctctaactgggattgcagcactgaccacctgcttccagtactccagagaatgacacttctagtcattagaccatggctttgggaccattgcctggttttttctcttactctctcttattgggtatgaaaggattcagaatatgtcacccctcccccccagtatatcactgtggcataaggattattttgaggtaaaggcgattaaggaaaagcagacataggacaagctctctgccatcccccgtatgcctgaaagtcaagcataaattcctcttgtgaaggtgcctcgccactcactttccataccagcaaagggatagcaaccttataaatggagaggagatggcaccaagaaagagtctatacaaacaaaccttattaactagtctttatctgtcataagtttccccatatatttgccttcctacaatttgtcaccctaggagctcaaagtccttttcctttgttttatcacttctctacagaagtattgttccttattaacatgctaataaaccccaagtcccaagtttttgtttttctgagacagggtctcactttctcaccaaggctggagtgtagtggcacaatagtggctcattgcagccttggctttccaggctcaagtgatcctcccacttcagcctcctggttagctcagactacaggtgtgtgccaccatgattaattattgttgttattattataattatttatagagacaaggtttttgccatgttgctcaggctggtcttgaactcctgggctcaagccatctgcctgccttggcgtcccaaagtcctgggattataggtgtgagctactgtgcctggcctcagccccaagtactaaccactcctttgagttagtcattactgagtttctcccatgtgtgtgcatactacatgtgttaataaagttctgtttatgtttatcttgctaacctgtattgtctcagacttatttgcagggccccaggcagagaacctaggaggatagagggaataagtttttcttctctatgggtgattcatccaaaagaaatgtgagaaatcatgcattattaactagttaaatcggaagagtttcttttctcttattccattttatggactactttataactcagaaatgttttctgtgaagtgttctgttgggtacatgcttataatcccagctactcagtaggctgaggtaggagatcccttgagcccaggagttcaagatcagcctgggtaacacagcaagacgccatttcaaaagaagagtgttctgtgattgttctgtgatttattactgaatcgcaacaacaataaaaaaagtatttgggatttggggaggaagaggaggaaaagctcactgaaatgagtgatgcttttagggcttcaaaaatccctagaatctcttttttcatttcaccaagtagtgttctagaagaatcattttacctgatattgatgaacattctattctgaaagaatatcctgaaaaaaggaccagggcagaaatgatggaaattttgaatgcaaggatttttgaggggaagcatgaaggaaacatgagggatttttgatggggaaactgaagtacatgaccacttgttgtagtgccttgtacacagcattttgttaaacatacctaactgttttaagtgaaacttggtttgctcattaagataacatattttgctgggcacggtggctcacacctgtaatcccagcactttgggaggccgagacgggtagatcatgaggtcaggagttgaagaccagcctggccaacatggtgaaaccccatctctactcaaaatacaaaagttagccgggcatggtggcacatgcttgtaattccagctactcgtggggctgaggcagcagaatggcttgaacctgggaggcggaggttgcaatgagctgagatcacgccactgcattccagcctgggcaacagagcgagactctgtctcaaaaaaaaaaatcatattttaattattacatttaatacatagtatatatgattttaacttctttttgtgagcatcagagccaaaccatacagttccaaaatcattttgattaatttttacttatttttactggaatctttttgggcaagtcctgtttctggtttatgtaagaaaaaatgcttcagctagtacttttcaagaccaagttagttgagtggaaacatcttccctaccctttaaaaagtcaactagaaaaaaatcctataacctaagaagtcactgaattcttcattcacatttaagagcaattcaggatgttcccttgttcttaaatgtgaaatgtctatggcagtgctgtacatagcagtagcacagtcctatcaaacaaaatttaatgcagaacaccagtatatatacaaggtaaaaatggagctgaggggagtgtgtgtgtgtctaaatgtgcgtggtgttgggggggtgtgtgtgtgtggtgtgtgggatgtgtgtgtagggggtgtgtgtgtggtgtgtctgtgggtgtgtgcaggagggtgtggggggtgtgatgtgtgggggtgtatgtggtggtgtgtgggcgtgtagtgtggagtgggagtgtgggtgtgtgggggggtgtgtggggagtgtgtgtgtggtgtggggtatggggaggtgtggggggatgtgtgtgtgtgtgtggggtgtggtgtgtggtgtgtgggtgtgggtgtgtgtgtgtgtttagggatacagtatgaaaggcccagaaccttttccttcttatggcctccctcttccagctgaacctatcctcatcctaggcagtacatcaaacatttactccagaactttaggacctgaaatttatttgtatatacgtaatattctatgcttatgatcattttacattaagatctttactttgcatagttttttgtttttgtttttagagatggggttccactatgttgcccaggttagagtgtagtggctgttcacaggcaggaacgtagcacattagagcctggaactcctgagctcaaaggatcctcccacctcagcctctggagtagctgggaatacaggcacacactactgttcctagctctactttatttagtttgttaagaaatcattttagcactttgggaggccgaggcaggcggatcacaaggtcaggagatcgagaccatcctggctaacacggtgaaaccccatctctactaaaaatacaaaaaaaaaaaaaaaaaatagctgggtgtggtggcgggcgcttgtagtcccagctactcgggaggctgagacaggagaatgatgtgaacccgggaggcagagcttgcagctgagatgctgccactgcactccagcctgggtgacagagcgacaatccgtttcaaacaaaaaaaaaaagaaatcatttttggaagagataaaaggcttgacagcaatatataaatatttcatttaaaataacttgttaaataatacttaaatgttaaatttcttaaaattcttgtttttctgagattttggaaaaacaaaaccaaataatatattgttaagggaggcagaatctcccttcctatttctttaagctcattttcataattaatctatttaggcctacagacatacatcaataaatatgtttctatttggttatttgtagatatgtaactcttatttgtcagagtagaaaactaagactcacaaaatacatgctctggctctcttagccttgtttctctttgtaccatgctataatttgtatggagaaaccagcctggtacttaagagagcaactacagaaccacagaatcaagatgctgaatatggattagttaattgttaggataaagttaagagactgtccctatggtgatttggtcattttgccttcatttggctacaactgattatttattcacaacaagtaaactaatataacacattagcactaagattgtaaaattttgaactatggataatttttatattactggggaaggattaatttgaccagagatttatcagaacaatgttttcaactattagctgagtgtttatcaaggtctgtggcatacaaaagttatttttgctttgagaatttcaattctaatagttctttaaatgtatactcttaatacgtgttaggtttttattatttatcatattgcttgtttacaaaaatcttccttttaatcatggccagccttcccagaatcctgaaatgcttcttgtatttgcattgcaaagagtcattattattgcataaacacttcaacttgagggtgtgtcatttcttggttgcttggtctttggctcttctgtccatactctatcattttaccctaatacctctcttctgtagcggtttcagtcatctaataaggattggaacatcccactttaaatccaagtataagatctattctcgttgttagaaagcaagagtgaataaaggtcagctgttcagatgactggctgtctgatttttttctgtgagcgtcacatgttaggaaaagctagttcatctctctgtggcttaggattcaacagcataagctgtcagactaacactgattgaaggtagactgggagggggaagcgcatctgtccaatggctcgccattggcttcttattacagcattctcccctgagacacactctgcatgctcattcacctacctcctcctcttccctccccttccttccctaccccttcattactgattcacagcgagaggcagcagcagcagcagtagcagcagcagcagcaacaacagcgctgcttgtcacgaatcgaggattgcaatgagctcatcgttttctccttgcagcttcacaactgccctggcttcctggctactgctgctgctgtcttctcacacatagacacgcacacacaccctttctcgcacacacacacacacacacacacacactctcacacattctcacatgctagacccttctaagcagcttgtccgtttttacacatgtatctgaactctcctgcatcactcttggccattttctcgcattcgattgcttttgccgttttttatttagatcagtacttgatttcattttcattttccagtctactttggggttctcgcagtggataatttagccaaaatgtttttcttgtggagacattagctgacaattcccaccacagactggcttgtacgtcctcccagggagacctaaacctggctcccctcccaccgcagttcttaatattgtggataagagatccatctttctcattctggatacctacttagtgctcatggaagaaggggtgccctgcccagccccagctgctaagctcacacctcctgtcaaaaagtcccaggacatgcacgacgagaggagcaagctggtgaatgagtatgcgtgtcgagtgctggaacttctggggatggggcatcgtctgtttgtgcctcggcttctggcggtgagattgtttttcattgaacttcatttgtagggaatctgctatcctctgtgaaaattccttgtatctctgaaagaggcttgttgtctctggttttcttctccttctccccattctgccgagaaggaaatgctgagtggccactgttgtgcagctcatttggagcctggtccacaccaccccttaattggttagaggagatcatggctcttttctcagagcccagggtcacattagtggcattatctctgtggcagcaaaaaaatggttttctgcctggctaggctcagcaataaagcagaatacccaagtgcttgatgtaggcattctgttatgtatatctccaaagggttaaattttacaacagacatagcaacttatctagactgtgtgtggtttgctttctaacctccccattagattgccaatttgattgttgttttgttttgttttttgatagagaattttaccacctaaaaatactttggtaggaaattttaggtttctctcctagaatgattgaactgtttatctgtgaaacagcttaaagctactggcttctgtgctgtgaatctgggaagtctgacttgcttgttatttgatttcctgaataagagaaaaatcacccttcctcatttcctaccaagggttaaaattaaatacccacaatcgctgttgcaggcttgagaactatacctagcaactattctataaggtaattggtttacagtagtcctataccattatgtggtaatggaataagaataatttagccttgtctgttttatagaatggagtttaataccattttagactatttcctcactatggttctctcatattagagtcttttcagtacagtatttacatgactgaatttaactcttttctctcctatatctcccttcactataattcatctctatttatacttatctttacaattactagttcagtctttatgtatgtatttacatgcaaatataatctcttctgtacaatcataacagacatgttagatagccatgtaaataagaaatttcccatcctaaggaaagtctatttgtcattccaaaacaaagtttgatgcagtgactagcatacaattataggggggatatttttgagaaatgtagttcctttgtcatttaaagaagaaataaaaagagctgaagacatgtgttttaatgtccaggtgaagtcattacttccctgaacctcatctttttcttaaaggagaaaactaaggattcatgattctatttagaaaggagttttgttttgttttgtaagtgaaatgagaagcattttatttcaggagttttgatattgtgaagtgctaaactatatttcaacaaattctctacatctctgaggaatcaggcttggtctaatatatttctgcatcctaaagactactcaactttgtgactcaaaggcttccaatggtaactttccagtaatttggtgccacctctctttggcatttacattttcagtgttttgaaggaaaacataaattggtaattaagaatattttgcatactcaactctgcattagggatgaatttaaactgcctctagtctgaaaaaattaattagcaataaaatccacagggagttgggttctcaagcttgagctctttggaggtcatgtatatctgtgtattgcaattgtaccaactctggttggttgccaaattaggcatctgaagtagtgcatctctcaggtggtcttgagaccttacttaggctctatcagttagagcctaagtaataatgccacctgcattatgtgtgaaaagcatatgctaggccagatgcagtggctcaagcctgtatacccagcactttgggaggctgaggcgggcagatcacctgaggttgggagtttgagaccagcctgaccaacaatggagaaaccccatctctactaaaaatacaaaattagccgggcgtggtggcacgtgcctttaatcccagttatttgggaggctgagacaggagaattgcttgaatccgggaggcagagattgcggtgagctgagatcgtgccattgcactccagcctgggcaataagagctaaactccatctcaaaaagaaaaagaaaagcatacgctgatttatcttgggggccacttgaaaatctctggctttgttttacacagttgcacttgaaaaattattggtaatacgagggtactctacattttgggaaattacaagttctttaattagcaatatggctgttagttgggctctgctattcagtaagttactgctcaaagtttagcatgtgtaccagggggaaattgttcagccttgtgttattgaactggctaatgatgtgggatcaatggctaatctgcacaggacactcctaagaggaatcctgccacatgcagtattgcaatcttttcatttctagtcaagaggaagtactaaagtgtaaaacatctctttacctttttagtcatgtttcaaacatgaatgcttgtgggttaagcacatacaagtactttattttacttttaagatcccattatttttttttcatcataaaaccagtcatttttcaaaaaaatcaaataaatgaagatttaccaagatagtgttgtggatttggtctctgagccttattacttattgttccctgattcacagagggatcatcaaactactagaactctaggtttctttaaccttcagttggaaggaggttactgatataatagaggatgcacatttggaatttttgcttgttacccttcaaaggtacacccagttaaggacaattttcctttaataaatcaggtgcaagcatgtcattttagatattaccacaaggcctaaattctatgtgtacattcaccaaacatgtttttcttttgtgaaattaaaatactgaaacaggagatgcaaacatcctagacatcagctaactggtatttcccttttctaaagcctgtgctttcaaatgattctcagacctccagaaatttttagctgaataaaaattctgttagataccataactaaaggaaaaagaagccatttaggataaaaatagtgaagataagaaagagaatcacatttagattttttttttttcaaatagtcccctaaaagaatcaaacatagaatctgctgcttattagaggcccttaaagaaatatttattcaagaatagtgagaagtttggaatagaagcatctggagctaatactcaaacagtggaaatatttccacccaccctacctctttcaaaaaaaaaatcaggccaagcgcagtggctcacgcctgtaatcccagcatgttgggaggctgaggcaggcggatcacctgaggtcaggagttcaagaccagcctggcccacatggcaaaatcccatctctcctaaaaatacaaaaattagtcaggtgtgggggtgggcgcctgtaatcccagctactctgggaggctgaggcaggagaatcacttgaacccagaaggtgggatgcaccactgcactccagcctaggtgacagaatgagattccgtctaaaaaaaaaaaaattcaccttaaaatatgatactcttgcactgaatttttcagtgggaaaaacacattgaaaatggtatcagtggtggcatgtggccagagtccatactctgtaagtgtgtgatatttggagaaggaggagaaactttgactttgcttatattcaaaatctccccttttccctgcggatgtttttttttgtttgtttttgttttgttttgtttttgttttttttttgtttttttttttgagatagggtttcagttacccaggctggagtgcagtggtgtgattttggctcactgcaacctccgcctcccaggctcaggcaatcctcccacctcatcctcctgagcagctgggactacaggcgcccaccaccatgcctggcttatttttgtattttttgtagaactgaggtttcatctcatctctacaaaactggaaaggctgttcttcacctgggaaattcttgccaacgctggtctaaaactcctgagctcaagcgatctctccagcttggccttccaaagtgttgggattacaggtgtgaaccaccgtgcccggcctccctcgggatttttaattttgctactatatgccataagaagttatcagatcattttatgttaaaattagtgttatctggagtttgaatacagctactcattttccacagtgaatcgaaggagggttgattatacatacacaaatgatctagctgtcccttttcgtagccattttaaggtttcattttggtcaaagtacttatgctgataaattgcatcctaatcttgtttgtttttaactttgtagactttcttaaacattaagtttaaggaaggatgaaagagcagaggagaatatgtcttccctttttacctctgttgttaacagctgcaaggattgctctttaaagagaggttacaacttataacagaagttaaaaacccaaatgcagaagttgccatgtatacttctgatacccccccaaaaaatctaaaaatcaatttttatatgaaaataagtcctaaatatactccataatttccattgtatacatcttaacttttgaatattggatatgcttgaagtggagccttaataaattcatggaacaaatttatgtcgatatctattatgtgtcaggcaatttgcttaattcatatcactggggtaagtgcaaaggatacttacattaacattctacttacctttccctctggatatttcttcctacctacttgaaagggaaaagaagtaggacttgtttaaatgactttacttttatctttttatatagttctatgcaaatgaagaaagaagtaatgtcacctttgaaatgtaattggtaaacatggttcatattatttaaaaggatttgtcagaaagctcagggagcaaaagacggttgtgtagtagagccactaatttcaaaaagttatcctttattagttcttattttattttatttttggagacaaagtctcgttctgttgcccaggctggagtgcagtggcatgatctcggttcactgcaacctccatctcctgggttcttgcaattctcctgcctcagcctcccaagtagctgagactacaggtgcgtgccaccacgcccagctaatttttgtatttttagtagagatggggttttgccatgttggttaggctggttttgaacacctgacctcaagtgattcactctcctcggcttcccaaagtgctgggattacaggtgtaagccactgcgcccggcctattagttcttatttaaaagctggtagagttattttctttattttccaagggaaggaaacatgcctctgcttattgaaattgtcgaaatcttattcgtattatcttctggctaacattacttaactaatgttgggaaaggagttgcattttcattattttactcttccctcgccattgttctgaaagcaatgtagaaaagctctaacaatttcccagttgaagaacagcctttccagtttaaatcagtttttctagcctgaagggattttgttcagtgagcacagatgtataattgtaaaccagaagccagcacaacctattttgggtacttggtttggtttttgaagtgttagtctgccttttaggggtacatttttaaagcatagatcttatgatcgcaagatcattcgttaagcctcttcattgtcagggtaagggtttagtattcatacaattataaactcaattatgagcactaattatctgcagagccagctcattaataattagtatgtgtgcaggcatggtagctcactcctgtaatcttagctactaggaagactgaggcaggagaatggcttgaggccaggagttaaaaaccaatctgggcaacatagcaaaaccccatctgtaaaagaaacaaacaaaaaaacaaatttgccaggtgtggtggtgcatgcctgtagtccaagctactaggaaggctgagacaggaggattgcttaagcccaggagtttgaggctctagtgagctatgattgtgctaccgcacttcagactggatgacagagcaagaccctgcctctaaaaaagtaacaacaataataacaataattagtgctaggatggtgagatagtagcactaggatggtgagaactggttctggagccctggttgacaccatgttttattttcataaacagcactactacatgtattttagactaattacattacattaatgcttgacattcataaagcttatttatttatttattttgagacaaggtctcactctgtcacctaggctggagtacagtggtgcaatatcagctcactgcagcctccatgtcccaggttcaagcaattctcctgcctcagcctccagaatatctgggattacaggcgtgtgccactacgcccggctaatttttgtatttttagtagatacagggtttcaccatgttgaccaggctggtctcgaactcctgacctcaaagtgatccgcccaccttggcctcccaaaatgctgagattacaggtgtaagccaccatgcctggcctgtaaagcatatatatttaacaaaataatatgtataggtgattcaaattttgttaaatatgtgtaagatatgtatgtaatgatggggtaaaggactataaataatgtaataaaatattaattatgtttatctctgtagtcagaccttatattaggcttttaaaaaattttttattttgggccatgaatatgtaatcaagaaaaagtttatgaccccaccatgtagacaatacacatacatatgtacgaattatgattgaaaaagtattcttttaaaaaaaaagccaaacaacttttgataaattcttagtgaaacatccagatctttgcagaacaagaaaacatccaatctttgccgagcaagaagtgtctatcccttgattgtagagggaaaaacctcttagatacagttgtcagcaaatgaagagttatctctgtaagcttataatctgcttatggcattacaaaggcatttgaggtaatacttaatgattatggaagtctctcgaagatagaaaattggaggaaaaaacccatcagaatcaaagtaggactaactacaggttgtcttctagaatactggcagcaaggtttttgttttatgtgttttgtgcttactggcatttttgttttcgttcacaatgaaattagctgtattgcagcccataagaaaaatataagttcttccaacttagactgcccactttatggaattaaaaatatcagtgaggccaggcacagtggttcacatctgtaatcccaacactttgggaggcctgggtgggaggactgcttaaggccaggagtttgagaccagcctgtgcaacgtagcgagacccccatctctaccaaaaacaaaacaaaacaacaacaacaacaacaacaacaacaaattcttttttttttttttttttgagatggagtctcactgtattgcccaggctggagtgcagtgcagtggcgcgatctcggcccactgcaagctccgcctcctgggttcatgccattctcctgcctcagcctccccagtagctgggactacaggcacccatcaccatgcccggctaaaatttttttcgtatttttagtagagatggggtttcaccgtgttagccaggatggtctcaatctcctgatctcgtgatctgcccgtctcagcctcccaaagtactgggattacaggcatgagctaccgtgcccagccaaaaaagaattcttaaaacgtagctggcatggtggcacacgcatgtagtcctggctactcgggagcctaagatgggaaggtttcttgagcccaggagttcgaggctgcagtgagctatgattgcaccatcgtactccagcctgggcaacaaattgaggccctgtctcaaaaaacaaacaaaaaattcagtgagagcaaggtactgcttttagccactaagatatctatttttgagcatatttgagcaacacagatgctatcaccccttatatttcttttggaattcaaaaaatgcactcttataccttaaattatttcattctcaaatacttgtttttttggtgtgtgtgtgtgttggtttttctttctttcttttttttttttgagacagagtttcactcttgttgcccaggctggagtgcaatggtgcagtctcggctctctgcaacctccacctcctggattcaagcgattctcctgcctcagcctcccaagtagctgggattacaggcatgcgccaccacgcctggctaattttttttatatttttagtagagatggagtttcaccgtgttggtcaggctgatctggaacccctgacctcaagtgatccacccgcctcggcctcccaaagtattgggaatacaggtatgagccaccaagcacggcctcattctcaaatacttgtgattaaagatattcccattttttaaatgggaaaacttacatagcactacaagtttgccaaagttgaagttaaaatgaatttattacatcctttgcaaccctgagtacctttaatgtgtcaagtactccagaggctgaggttagcaaattgaataagatgcagttttcacacctttgtatacttgagcctccctgccccatggttgccagatctcttctcttcttgagcttaactgagctgggcaatccatgtgatttgcagcaatatcaacaccaacaatgtctaggaaaggacagccacagggaactctggcttctcgtgtccagagacttaacctgagttaggcttcagccccaccctggtgggaaccccattgctgtaccctccctgaggctattagcctctcttaagcagcatctctgcctacatggccatccctgcttgactagaggtccggtgtgtgagaatgtaggattcctcattcttgataccaatctatctgcttttgtatgtgctaaaaggctggatttgaaattaggccttggcaatattagaaaattagataactatgctactgtctgcagagaagagatcgcccatcaccattttggggcatctgtttccaggtaactagaggttaattgcattgaaaatagaagaggtgccttcagaggactttcggtagtgaggaaagggttaatcctgtttctccacaaaccctggaagcagtttgtctggaattgtccaaaccactaccagagagctaatcatcagaactggtattacatgtgaaaaacgaagcctagggatgtgtggtacatctggtagaattggtagctggatgctttcccccataattcagcagttgatattttagttagagaggctctctctcagactgaagttgtttccagtaactgccttttccagctaagttaaggtgagttgagagcatgctaagcattctccaccacttgttgctattgcatctgtatgtttatgaggaaagagaaatctgagatgtactggagttttttgttttttcattaccactgttagcctagctccattttttgattactaatttgtggacctttgtgaaactgcctggtatgaatatgttcttttctttcacatttctgtttaaagggcaggggaaaagggaagcaaactctagcaaaagagagatgaaagtagatttcattcatttattctgttagaaatttgagtgcctcctatattctgggcattgttcttgttgctgtggatgtagcagtgtgaaagacagacaaagaggggaagaaggggagcagatataaaactggaaagtgaattggtggggaatgggctaggaggaagaatttaagtgctcagagaaggtctcactcagatcttatattgagctaaaatctagattacaagatgttgctaggattggactacatgtcttgctagtcatgataatgacttggaccagggtggtgatgacgaaaactgagaccctgttacaagcaggaatttctctggcttcctgcctactttttcagtgcagtctttaatcagctttacattttaatttaaataaagtaatattttgacacagcatgtagttatgtgatttctgggtgcttttttaattgttgaagtttttgactattaagtactgactgtaaaacatctaatttgtttttggcttctgtgtactcatcttcctaaatctataatatgtatcacagtgtttgccaaagttgtttatagctgtttattaaaatatttattgtctttcttattataaaagcgttatacagaaagtataacaaaatgtaatgaaaaaaataaccttcaggttacagtgacccatgcctgtaatcccagcactttgggaggctgaggtgggaagataccctgagcccaggagttatcagcttgggcaacagagtgagactcccatctctatttaaaaaaaaaaaaattataagtagctgggtgtggtggtgtgtgcctgtagttccatctactcaggaggctgaggcgggaggatcacttgagcctgggaggttgaggttgcagggagccatgattgcactatgcactcccgcctgggcaacaggagaccttgtctcaaaaaaagtaaaaataagtggtataacccatgattccactatacagataaacattttgttttctttttagtcttttttctgtgcacagatatatttatttccaaatggttttttagtttttgaagaagtaaatttggtaaacaatagttttcagaagagatcagtagttaggtggtttgtttcatttactttttcatagcattcttcaaggtatgggatcaatttcctattcttttcacttgaactgctgctgtcattagttgaaaagccatcttcccattaggtgtttattgtgtaactgatgtattttggttgcattttctatgtcttcagccagctttttaataatatccttaaaatgttcattgagctgaagtcacagattagtcctagagtccagtttcttttccttttttagccttattcttttctcagagctgtaacttggtaagctttgccaggaaccatcattctaattttcaggtaatatgaattcagtatgttagtttgttcattaactcttagattgcttctgtgatttatggtgatttatttcagcttatagtaacatcatctaaatattgaaatgttagaaatatcttcttaaaatgtttggaactaacttagatcttagctataaaagtatattcaagaaaatataaattctttttgaaatatatttgtcctcaaagcaggctgaaatgtaatgacgattcttgatgattattttgcagacctcaaaggaagaccttctgcaggctgattttgaaggtgctttaaagttctttagagttcagcttccaaagagatacagggcagaggaaaatgcaagaagactgatggagcaggcttgcaatattaaagtaagaacatgagtttttatataataaaggtaaaatatgagtgcagaataatatgacaaattatgtaaaaatttttttatatgttgcaaggtttgattatgtttaagattagattgtgtatgaactgatttctcccagatgtgtttgtcaggctaatgtgtgtatagtagctgtaccttctagtaggacttaaagttggcaggctcagattataacaataggaagataaacatttatctcataggtggggctctagagtgggctgctgtgatagtggtttccatggaagcagacttagtatttagcttttgccatctgttttaagattatttaggacaaagcaagaaaagcttgcttaggcaatgctttcatttctctaagtgacttggaaagtttgagtcttgatctgcccattcccatcccacacctgccaaatatctgtggatacattggtccatgtcacatgtctgataaagctaaacacattttataaatcaatttgaaattgaaaactctttccagaaagttgtagtattaaggtgagagagcactcttaaaatatttggaaccaatttactgatgttaattcttatacctctacaatataccagggtatctttttacctaaccataacgtaaatataaattgttttcctaaacaaacagagatcctggtcttagggactttacattcttgcagaaggaaacagacaataagcaacataataaatacattatttatttaacatgttagaaagtgataaatagctgtgaaaaaaaagagagtaggggaagataaagggaggttggattagtgggggagcaaaggttatgattgttattagatagtcaatgtggacctcactgagtcaatgaaggagatgagagattagtcatggagatgtcctggggaaaagctttctaggcagagtcaatagccagttcaaaggtccagagactgcctcatgcctgggtgggcttgagaaacaggaaggccagtgcagctggagtgaagtgaatgaaatgggagtagtaggaatgctcacaaagagccagaaaatgtaggccattgtaagcatttaggctttactttgagtgaagcagggagctcttgcagggtttttagtggagcaatgatatgatctgtctgaggtttttaaaggatcacaatggctattttgttaaaaacaaccataggaaggtaagagaagtagggacatcaaacaggagattttggagtaatcctcttgagagatgatgatagactgaaccagggtgttaacagtggagatagagatggagtggagatggagatggttggaacctgagtatttttgaaagagaaccaataagatttcctgatatattaaatgtgagtgtgaggagaaaagaagagttaaaatgattgcactgattttgaactacgcaactaggagataagagtcaccatcaacttattaagcatattacttaaaaggtactttgacacagacttcttttaggcaccagagccactgtaacattttttggtataacacaatcattttaaatttaaatcaaattataaatgttaaaaagtacagttaaaaagtacactgaaagtaagtaactgggcagaaaaaaattattttgtctttcaagtgagctttatattcaaagagatcattttccaaagctatcataagaaagatggatttctgaagttttcattctgaaatgcaaactctttaaagccttcacgactgattgttttatttggccaaagtgtaagccacatttatttgtaactttgaaagtatactctagtgggcatgatgcctttgactgaattttgtgggtggtgagtttgaaaggtaggcttcagccaactgattgtttcggagatgccagagagaagtattgtaaattgggtcaatgttgtaggcatcctttaaaataaaatatttatttctaagaataaaagagtagagaaataagaggtacaggtaaggtgaaaagttaaaggttttcaagggaaatctcagaggattgccaagtcactgaggacaaaagaaacccaggaaaacaattgaaaaacatgaaatgtatagggaaaatttttttctccaatataatttatgaagttcctggaggtggctagttattatcaatccagaaacatgggatctgagagatggagaagcgtaaaatgttagaaaacaagttcaaaatataatccaaatggactgctcctggaagggaagtgctgggtacaaccagaataaattttttggacatgaataggtaaatatgaatatttttaaagcttttaataagatttcaataatttaaaatttttaataatttaataatttgtaaagttttaatagttttttgtggggttttctttgcattatctaaggagaatgcctttttcttggatatttaagacggtatccacgggacaccatttcatttataacatataattgtagagtgaatgattgtgaggcagatgtgaggtgaaactgaaagaaggaagacataagtcatccagtattgggctgggattgtgctgggactagaatgtaggtctccaatccaaaggtctaaaattgtttttaaaccaagacctatattttggttgcttttatgtcaagaccatgactatatgtacgtacttacatacacataactgaagagatacttacccttacactgaggcactctgatgttttttgttctattgtattgtatttccttttttttttttgaaatggagtctcattctgttgcccaggctggagtgcagtggcacaatctctgctcactgcaacctcccaggttcaagcaattctcctgcctcagcctcctgagtagctgggactacagtcatgtgccaccacgcctggctatttttgtatttttagtagagacagggtttcaccatgttggccaggctggtctcgaactcctgaccccaagtaatccgtccgtctcagcttcccaaagtgctgggattacaggtgtgagccaccattgcccaacctattgtattgtattgtattgtattttaaacttctccccggatcccaagaaaatccccaaaccaaaaggctgaccacaacccactaaatcgattttacaatagcttgtagttttgaaaaaacactaagacctatcccactgttcctaccacctccccgttccccactctgatctgccacaacccatgagaggctgtagatgacgaggtgttacaatgaataatggaagtgcatgtgtaggtaaggatgtgagtcatcatgccatcattacagcagcttgtgctggcagttggaaattttaggagatgatggacttatagactgagacttatgtgttagacaaagcattcatggacaaaggtgactgcaggcatggaataggcaagaaagtttaactccttatccatagcctatttaagattaaagatagaatttctgccaaaagtaatcaagttttaaaaatttttaaattattttcaaagttggtgttgtatatagttgtgtcttttttgaatggacatgttcccatttaattaccccccaaaataatcactttcctttaattttaaggaactgtaaccagtgatttcagtgaaactgaaactggctttaaaatagatgcagcagttgcaagcaaaaaataacttgttagctctgtatgtggtttatttctgtgagtgtaccaacaagatttgttaataaagcacattagattggataaataattttatttttccaaaacttgtatgacattaaatatcaggaacattttcaatagcttctaaactggtaatttaactaatgtgactccaagttattctaatacccttctgttcctatggtttcaactaggccaaaatcagaaaacatattgacccatcaggctttactttgaacagtcatttggttacttttaatattgaaatcaagacctaaataaaagatgtttaaagtgcctaatatgaatatcctgtattttcccagggagtcagtttttattaaatatcatactttgatttttgccttatagttaaaaatgctgccattgcagagcttcttaaacttggattttggcttcagagactctgaattaccagaaatttgaatttctttgtatgaacatatgagcattttgtttttcttagtaacataatacatagctttttttttttttttttttttttgagatagagttttgctcttgttgcccaggctggagtgcaatggtgccatctcagctcactgcaacctccgcctcccggattcaagcaattctcctgcttcagcctcccgagtagctgggattataggcatgcaccaccacgcccagataatgttctatttttagtagagatggggtttctccatcaggctagtctcatactcccgacctcaggttatccaccccccttggccacccaaagtgttaggattacaggcgtgagccaccacaccaggcctcgtaatatatagctttattaagtgcatatacacataatctttataattcttgatctgattacctgtttttctacatatttttattcaataccatttatattgtatcaggttgaattgatgaaattaccattcctgttggtcagaaactgtcaggtatttgattggtttatgatttatgattcagtattttatgcctccttacagctcaaataggtgcatatgtagcttagctctatggccatgtaaacttttcctgagaattattctccaaaggctaagaaacaagtctttttttttttttttttgagatggagtcttgctctgtcaccaggctggaatgcaatggcgcgatccctgcctcctgcaaccttcgcctccctggttcaagcagttcccctgcccagccttccgagtagctgggactacaggcgtgcgccaccatgcctggctaattttttgtgttttagtagagtcagggtttcaccatgttggccaggatagtctcgatctcctgatctcatgatccacccaccttggcttcccaaagtactgggattacaggcgtgagccactgcactcggtcagtcctttttttttgttttgttttgtttttaagttgatttttatttggaataatgttccaagtaccatatttacgatggacttcagtagtagcaaagttcataagcacaatcatccaaaattttctgttggtagagctttataatagagctttttaaaatatgttagcttatttcacttgtatttcattagtaaaataatttgagcaaaattaaaaggcaaaatctgacattaacctaaaggaagaaaattaggaaagaaaagttatttattgagtgcctgttgtgtcccaggaactatgccaagaggacttttcagaggaagtaagagttaaaatgaaatctgaaagattattaggagttaaggagtgtatcaaggcagggagaaggatgtttcatgcagacaatatgcagaagcccataggtaaaaaaaatatggagttgcccaagacctgaatgtaggtcatgactggagagtaggttgcaaggagggagaggcagttaggggagtagatagagaaaagactagagaggtaagcaggagccagccagcttgtgcagagccttgtaaaccacggtaagcaatttggattttatcctgaggggagtgataagcactgaaggatttaaaataggagacataaattatcaggttattgttaggaaggtcattctggttgctgtgtgggaatggattgaaagggttaagattcggtattggtgacagaccatttcaggagctgttgcagtcatctaggtgagaagagaccagagtttttgtaataggctgaagaaattatggatgaattccagagacattcaagacataaaattaacagattttagtgattacatgtgagcctcagggcagataaagagagccagcgatagcacttaggattcttacttaagcaacttggtggaaatcacactgagaaaggaaacaaacaagagaacaaattataagcactaaagataatgagttaacttttgaatatgttgttcgtggtacatatccacaactcatatccaagtagatataaatatccaataggcaggtggatactgaagtgagatctgagctaaaagtagacatttgggagtcatcagcattgaaaccatgggagtgggtgaattcttatagcggagtatatacaatgagcagagagaagggtggaggatagatgcattcacatgtaaaatacagatgagggaatagaagctggtgagactagaaggcaggaagaaacccagaagagtatgactgtgaacactaagggaaaaggtgtttgttttcaagaaggaaggagttgaacaagtgtcagtggtacctagaggtcatgtataaggtactgagaagtggaaagtagctattgtgcaatatttaacgaaaagacatccttaatggtcttaatgaaagtagtttcagttaagttatgacaaataaaagccaatgattcaaggaataaatagcaggtgagtaaatagagaaatgaagatgagactgtttttctaagaaggttagtatggggagaggatggaaaatggaagagatagccagtaattggactgagcatggtggctcacacctgtaatcccaacactttgggaggcggaggtaggaggatcacctgaagtcaggagtttgagagcagcctgggcaacgaagtgagaccccatctctacaaaatatttgaaaaggctgggtgtgatggctcacacctgtaatcccagcactttgggaggctgagacaggtggatcacttgagcccaggagtttaagaccagcctgggcaacatggtgaaaccccgtctctaccagtaaaaaagaaaaaaaaaaattagccaggcatggtgacatgtgtctgtagtttcagctactcaggaggctgagatgggaggattttttgagcttgggaggcatgggttgcagtgagctaagatcatgccactgcactccagcctgggtgacaagagtgagaccctgtctcaaaaaaactccaaaaattatctgggcatggtggcacatgccgggagtcctagctacttgattggctgaagtggaaggttggcttgagcccaggagttggaggctgcagtgagctatgactgtgtcattgcattccagcccaggtgacagagcaagactctgcctgtctctaaaaaaaaaaaaaaaaaaaaaaaaaagagatagtcagcaagcctgagagtaagtatgagagagagagagatgagtaagtacaagagagagagataagaggatgttgagactaagatggatttttggaggatgggaaagatgagtctttaatgctaaaaaaatttccaatgactcttaatttcttctttgagcacctactatatgccaggcattgtaccagatagacccagggaatatgagattgagcaaaagcacatatgctctcagagctcatggaattcacagtgttaatttaatcaccttaataaatgtatacttacagagtgagataaatgttcagaagagatataataaagatacatgagagcaaagagcaaaggaacctgaccttgactcaatgatctagagaaagcattcttgaactgagattacaaggtattccagactgaaaagcagcatatgcaaagcctgtgaagagggagagaatatagtaagttgtagaaactaggagaaggccagtttgactgtacttcagagaatgatgacagttgatatccagggaccaaaccacttcatctaccaataagaaggaaaagcccacagaaagagaaaagttaaagattaaataaagaaagggaaatatattaacaggaaaaggactctgaggaggtaagggattaacctcaaaagaatggacctttcattacaagctggagggaataggcaagggaaggatggggaaaatggtgaatgtgtagtttggtgaggaagaaattgaggatatttcatttgaagttttctattgtttctgttaaacaggatctaggatgaagggaatgcagtaaagtgacagctttgagaaacatggaagagcttttagactggaaaaactcaaaagaacagctagtctatattgttgtagactatgagttcatagtggcaaaaatctacagtgttttgtaattttctttagaaacatttagtagtccaaatgtatatatgaagaagacagaaggttattttaaccacagttgaggtttgccaatatgaggcaaaggaaggacatggggccagggcagttttgctaataaactgtatattgggttggggagtaagagggagtagagaaagaggtatccctgatttgtagcgtttgcccatttccatggtatgaatactcccaccatggccaaatttcaagctaccaatgacttaaccgccccactcaatttctgaatattaagagccacttttgagctggtagtttctgacactggtacaccacagggttgaggagatgaggctaatagcaggagagtggttgacatgatgggaaatggagtctaattaatagaaaagagagtgaagatagatgggactgaaagactacaagaaaagggcctgggagaagggaacaaagaattattggactcaggaagaatggcggaagaggagattaattcccttattgggggttacccaagataaaaagcatctttttctcaaaaattcatatattttaaagagaactttctgatactagaaagtaatattgccctgggctcgcccctgtaatcttagcaccttgggaggctgaggcgggcagatcgcctgagctcagggcttcaagatgagcctggccaacatggtgaaaacccgtatctactaaaatacaaaaatttccctaggcatggtggcacgtgcctataatcctagctactcaggaggctgaggcgtgggaattgctggagtccgggaggtggaggttgcagtgaactgacattgcaccactgcactccagcctgggcgacagagtgagactccatctcaaaaagaaaaaaaaaaaaactgccctgtgctcataatttccagtgatcgcagcaaaaccatgccaattactattttggcattcatggccacctcctatgatttacttctctttgtcctaataattctgccaccatcactaccattttactctgatcacatgattaagggttggaaatgcattgtgggaggaatagacaaagatggcagaggcagtgcaggtagcgggaatgagggaatgaggaagggcactcatggttaaaaacagaatcctgacccagcatcttctcacacaccaaaattgtcttcctaccccgtgctaaagaggtagctaccaatgataagatgttacttatcacctacttgcctcagaaaattctaagctctgctccagctcaattacctatatattgtgctggactattttctactctcccaaagttgcaaatacaatttgatcttacccctcacaaatcatgtttttaatgagacagtggtagattcctttatctagaatttaattttttttcttcgaagacctccatattcataactggatttgaatgtttttgaaaataactttcacagtagagcaaaactgtaaagaacaattgcattaaaagcaatttacctctaatttcttcatgctgtttgctatttattcctggctgttgttgctgtacgtgaacaagaatgtactctctgaaatagaggctttctttgaattagcactgaggtcctacagaagtttttgtcaacttcatggatctaaaatgtgtgcttttatgtacaccattgaaaagattcacttttgattaaaacacatcttgtgttccttttctataaagacctctatatgttgacaaccacatttgagttgttaggtttagtgtcataatcttctgctggagaaatgttatcatgttataggatacagatgtgataattaacacattgataataaagctgggtgcggtggctcacgcctgtaatcccagccctttgggaggccgaggcgggtggatcacgaggtcaggagttggagaccaacctggccaacacagtgaaaccctgtctctactaaaaatacaaaaattagccgggcatggtggcgcacgcctgtagtcccagctactcgagaggctgaggcaggagaatcacttgaacctgggaggcggaagttgtggtgagcggagattgcaccgctgcactccaagcctgggcaatggaacaagactgtgtctcaaacaaacaaaaaaaattgataatgaagtagtttctatatcaaagcatttgccactgtttgcctttgagacttctattaacactcatagtcttcagtgcaccttagattggggtattgttttgttttattcccagtgagcagggaacatgttaatgttggacatgttctgaaacagttgataacaggcagaggaaacaggtcagagctccagatgcttaggcatcaggcaccttccacatttaaaaaactcagcttttgtggcccttcctaatcagctagaacagtggtctcctaccagggatcattttcatggaagacaatttttccatggtggagggggagggcattagattctcatagacagagcagtctagatcccttgcatgtgcagttcacaatagggttcacgctcttatgaaaatctaatgctactgctgatcagacaggaggcagagctcaggccataatgcttgctctcccacgaggcacctctttctgtgtggcccggttcctaatgaccggtactggtccgctgcctggtggtagggacccctgagctagaacacatttgtcttctttatttgcttctgccattttgtttctaccctgtacctacttctgccagtcattttctggcagttcattaaaaagaaagccatgcatacattttaaaattaacctgatgggtaaactaatggatataaaaattgatttatatttgggcaactcttttcttagaaaaacaaatagtaaaccataggaatagagcattatgcctttatagacgttccaaaattggaactatgtgcattccatgcataattaacaacaaaaagaacatcagaattgctatctcacctagtagtttatttttcttcaaaaactttaagttttctttttttccctgcacctaattcacgcccagcagtcttataatggatcaaaacctaatgattatgctcttaaataagagtttccatattttgtttacctttctgaagtgttttgccaattaccttttatccagtagttgtgatttatatctatcagagttgccataacgttagaacttgtcttcactattgggaacagcagtaatcaataattttcccgcaaccatttaccgtgattctacatttctttgaattattttatttatttattatcacttgaattcatattaacattatgtttaaagtgtgcttcatgatttgtatttggggatccgatttacagaagaaaagaaaacattcctctgaacccttgttgcttctcactggaaataatttcattatgttaggcaacaataaaaataaatgaagagaggttggttaatgagcacacaagcatacactttgatagaaggaataagttatagtattcagtagcacatcagggtgactatagttaataatttattgtgtacttcaaaatagaagattcaaaaggttcccaacaaaaagaattgacacatgtttgaggtgatcgatatcctagtactctgatgtaatcattacacatagcattcagggagcaaaatatcgcatgttctccataaatatgtacaattattatgtatcagtaaaaataaattagaaattggctgggtaagtggctcatgcctgtaatacttgcctttgcctcccaatactttgggatactttgccgatcacttgaggtcaggaatttgaaaccagctttaccaacatggtgaaatcctgtctctactaaaaatacaaaatttaggccaggcgcagtggctcacacctgtaatcatagcacttcgggaagccaaggtgggtggatcacctaaggtcaggagttcgagaccagcttggccaacagggtgaaaccccgtctctactaaaaatacaaaacttagccaggtgtggtgacacgtgcctgtaatcccagctactagggaggctggggcaagagagtctcttgaaccaggaaggcagaggttgcagtgagctgagttcgctccacttccctccagcctgggcgaaagagtaaaactccatctcaaaaaaaatatatagatatagatatatacatatctatatatatattagtacaaaaattagctgggcatggtgacacacgcctatagtcccagctacttgggaggctgaggcaggagagtcacttgaacccaggagggggaggtttcagtgagctgagatcgtgccactgcactctggcctgggcgacagagcaagactctgtctctaaataaataagaaataaacttaaatgaaacttaggtgtttcagataagttacattaggaaggttgggccattggatcctgagggtttagtgttctaaacacttaaagcacaactgttttagataccaatgcctgtactctggggaatataaaatataattatattagatttactgagtaattattcatattttcatttctccaactcagatccatttaccttgcaaataactaaatctaattaatattctggagaaattgcttatttcactcttgggcctttttctctcctcctctctcccctactgttcctaaaaaaaaattttttttttgaaatggtggcagcaacatgtaaatgaccatagcaaccaaaaaaagcgaaatattttaaatgttgttcacatatctccaactgttgtttgtcaagccttctgaagttccacttaaagacaacaaactactgaggagaaaattatattccttgctgtagttaatagttgtgatcaaatggacattcttttctcattgccaaaccctctgacttggggattttgttacttcaacctgtgagaggaacagagctattgctttcatctagaacatctaccttttgccttttttcttagcctgaggcacttcctacccaaatcattactgtatatgtagttaatatagtctcttttaaatactcattattggttttgcttttttgatttttataatgtgaaggaatcttggagtacaaacgacataaagaggtggtaaaacagtgttctgatagtagtttaggctaggagaagcgtcacgttctcattgtggcacaagttcaacagatttatcagtgtgttagcctttccaggcactgccttattctgttatccctaacccgtagagtcaccatactttctactaactcttgctacttttatcctgaaaagttttagctgaagtttcttacaaaattggttcctgaagaggtcatacttttgtttctgtttctcatgtctgctgttttacatctgcattcattttctagggatgccctaacaaaataaatacacactggaaggattctttactcaacttttattttagaatcgagggtgtggccaggcatggtggctcacacctgtaatcccagcactttgggaggccaaggtggtggatcacttgaggccaggaggttgagaccagcctggccaaaatggcaaaaccccatctctactaaagatacaaaattagctgggtgtggtggcgcatgcctgtaatcccagctgtaatcccaactcgggaggctgaggcaggagaatcgcttgaacccaggaggcagaggttacagtgactggagatggtgccgctgctctccagcctgggcgacagagcaaaactctgtctcaaaacaaacaaacaaacaaaaaaagaatcaagggtacaggtgcaggtttgtcacatgaatatattgcgagatgctgaggcttggagtacaaaggaatctctcacccagatagtgagcttggtgcgcaacaggtggtttttcagctcttggctacttcctgcctccctcaaatagtcctgagtatctgttgttcccatctctatgtccaggtgtactcaatgtttagctcccacttataagtaaaacatgcagtatttggttttctgtttgtgcattagtttgcttaggataatgacctccagttgcatccacgttgctgcagaaaaggtgatttcagttttctttttttctttttttggagacagagtttcactctcattgcccaggctggagtgcaatggtgcgatcttccctcacgcctctcgggttcaagtgattctcctgcctcagcctcctgaatagctgggaatacaggtgtgtgccaccatcctcagctaatttttgtattattagtagagatggggtttcaccatgttggccaggctgctcttgaactcctgacctcaggtaatccacctgcctcggcctctgaaagtgctgagattacaagcgtgagccaccacgcccggccaccacattttctttatccagtccaccgttgataggcacctgcttgattctaagtctttgctgttatgaatagctttgtggtgaacatacaggtacatgtgtctttttggtagaacaatttattttcctctgcgtgtatacccagtaatgggattgctggttcaaatagtaattcaacatttctttgataaatctctaatctgttcaccgcagtggctagagtaatttacattcccaccaacaatgtataagcattcccttttctctgcggcctcgccaacatcttattttttgacattttaacaaaagccattctgactggtgtgacatggtatctcattgtggttttgatttgcatttctctgatgattagtgatgatgagcatttcttcatatgtgtttaggctggttggatgcatagactgggaggcttaaacaacagaaatttgctttctcacagttctgaaggttagaagtccaagatcaagatgttggcagggttgatttcttttgaggcctctcttcttggtttccacatgggatggtcaccatctcattgtatcctcacatgattattcctctgtctatattatctgtgtcctaatctctctctgtctttgtttttttttaagagatggtgtctcaccatgttgcccagactggtgtgcagtggctagtcacaggtgtgattatagctcactgcaatcttgaactactgggctcaaacgatcctcatggcttagcctcctactgagtagcaaggactataggcatgtgccactgtgcccagctctaatctctttttataaggacaccagtcatattggattagagcccaccctaaggacccattttaacttaattgtctctttaaaggccttatctcccaatacagatactggaggtactgggagttaggatttcaacatattaattgggggggcacaattcaccccataacagtgttgttctcatagtaactgagtgcgcatttcttctcaatttctctgaaaacattctcttctgaacgtgaatcttgcttggcagctctgagctatacctccaatatcttataacacgtgacagtttcctatttttgtcagcatacccaacatcacccattttctcctaaactctcagatgatctaaaagatcctattttttttttacagctccaccctccacttctatcagcccacttggttggcaaggaattttctctggcatgcatgatagcttgttagaagttctaatttaccttacataccctgttctagtatggtcttgttgcattaactttcttataatcctgcttttatattgtatcctatgttatgcagaccataacctgccttattcctctcttttcctgaaagagaggcagtgaattgtgcaagtaagttgtatctttgcacaatgtccagtggtagaagaaagtctatattgtattataatagagtattttaagcaacaacatatgttgaatactatataggacacaggtacttagtttactttctagaattatttacataaaaacttttgtccctaaattttgacccaattttaggatggccattatttaagaagccagatggcagacattgcttctgtgaaggaaacattttgaagattgtctgacatagtaggatcttcttagagccatcagaatttgcagtttcaggttcctgacattgcttgtctggagtgctataactgtctcataactggtctctccggctttggtttctgtcccctctagtttcctctgcatgcgaccatttgagttgtctgtctggaaaactaacctcagtttatcactcctcagaggacactgaagctccctgttacctgcaagacaatcccacacacctcaggttggcacacttccctttcactcataccaatatgccatggccttgtcacatcctgtttctgctgcctaggttgctttctgtctgtggagtgcctggagaaggcagaggctttgggagtggacaagtctaggtttgaattctggctccagttcttactgagtgatcctgagaaagttacttgatctccttcgagtatgagtttcctcatcgtgaaacaaggctaatacctactgcacagagatgttgtaagaattaattaaattaaacacatgtgtgaagcattggctaaattaattccttgttgtagctatgtagtcaagcaaactcctattcaccctttaggttgcaggtcaaacatcacctgctctggaaacctaggctgttatttattctgactctggcaattcctacactagagcaccactgttggcgttaagaacgtggttttctgaagccacattgttggagtttaaatttagccttttccatttaattagtagctgtttgatctctggcaagttacttattgtacctcagttatctcttctgtaaaatggagatcctattttctatgaaataggattgctatcaagattataaataggataatataaataagaaacttggcacaatgtagtccataattagtgtacaaccaagatagtcattatgactctagtttctctcattgtgaggtcctcaaggctgtgactcttccttgcccctccctagatgcctgaaccaacacctagcatagtagatgaatcaaggagtccatctactatttatttatatttattgaggtaacaaaccctgtttataaaagatgaagaatattgggctttgcattttccctgaaaatacttctggtaataaacaggaaaatcctcaaatgttacactgagtggtattccaggtttattcctatagaaaaatgaaataaaaagtgaaatctgtctgaattttgcttttaagagtggtgtttattatactgtgtagcttagagggctcatgcaatataaatttgtgaattttccaccattccagaccgttaagacttagatagaaggtcatcattcttccttgatgttgtggataaccagatgccctccctcatccctattagatttttttggattattatacagtgattttaggatactaaaagttttttcaagtttcatttgcataagtttcttagtcgtgtgtgatcaaaataactgtgttgaaagaattgaggctaagatgtatatgccacagactttaaaacagagtagaatgtcagattaaaagagtttatagtcaaaagattgctaatgtaattactaatgtaatataattactaatagatcacaaatgatagactagttatttccatctttatgtatgaagttataatcacattttatattttgatgtacaattttttatgcatttcataattatccatttattttcttcataaattcaaagactgtcatgagtatatctgcatatttatggttgcccattgtatcaattatctattgctgtataacaaaccatcccaaaacttacaggtttaaaacaacaatatttttcgtgattctgtgagttggctaggtggttcttctgttggtatctcctggattcactcatgtggtagcattcaactgttggaacagcttagaacagggcccctctttccccatgcttactcatgctcagcatcttcacaatactgtgatccatgttctcaagaaggcaagatccagtgcacaaacactttatcaagctgtttcaaacataccacaagggaaagggataccaggagtcatgactgattagaagccattcctgtaacaatctgccacattcatgcatggaaaatttgtgtttcagtacaaaaaaaaaaactagcttagtttctgaggagagagctgaaagtctggtgtggaaaggagacttccttcccattcaataaaatttgcttttactcgttaatactttttgtttaatttaatctatttatttttatttataatgtgatttaataatttccttttatataatttggtttttttttgccatgaggtgttatttttcttttttttcttttgaggcagagtctcactctatctcccaggctggagtgcagtggcacgatgtcggctcactgcaacctctgcctcccaggttcaagcgattctccttccttagcctcccaactagctgggactacaggcatgtgccaccatgcctggccaatttttgtatttttagtagagacaaggtttcatcatgttggccaggctggtctcgaactcctgacctcaggtgatctgcccacctcggcatcccaaagtgctgggattacaggcatgagctaccgcacctggtgagctgttatttttcaaacaaaacaaaaatacttcacaaaaccaatgaatgagtgaacctggcatcagtttagggtctctgatagcagaaacagtagatgattatgaattggtaataacatttgagtagagatactctgattacaaggagcatctaacctatgatactgattctatcatacatcagaaaggtgggtttccagagttcggaggaggctcagaattgtttcagttgtctacctcatggttattaataatttataggagatttgagggaaattttcaattttgtttatttaattttattttaatttgacaatactttggtatcttttggttgtgctggttcattgttctgttgaacaatgctaactctaaaaagaacgttttagacaacataaatcaatggaggaagagaatacatttgccaaaattaacatgaacactttcttaagaaaatagcacttgagaatattgcaattaaagactaagagagtactccgagtctcccaaagtacctacattcttagccaagatacagcagcagctgacctttaaattcatatattccaatttaaataggaagttaaagttgaatattacaattggtttttcagggtaaatgttgcccttttttcctgaggatgagtccaccttgtcttaaagaaaggacaactggcaattctttctctgacactgaccaattgaaaatatgagagaaccaaacaaaagctttccatataatatcaacctaactattcagtgttttgctatagacagactctttgattggccctagttaatctgttcttgttttaattcatctcaaggttcagcattagtcattttatcccaacagatataaccttagattctttctatggataatatatttagactcatcttaatgtaaatttttcatggaggttcatgggtagaacctctaggtgactaaaaaagaactagctttatgtctagataaaacgctacaactttgttccttataaaataatcagacctgtatagtcagtgaaatatcacaagatccaaattctagtgacttaactttagattgatctaacacctaaggtaggagagtggagttgggggtaagcaaaggagaggagatcatgtaatacattctcagtatttggagaacaatgcggtggaaacaagaaagaatacaaaagaaaattcaaaagatctagtattttgtcttttgaaaaataagatccaggctaggtgcggtggttcatgcctataatcctagcactttgggaggccaaggcagacggatcacctgaggccaggagttcgagactagcctggccatcatagtgaaaccctgtctctacaaaaaatgcaaaaattagccaggtgtggtgtcaggcacctgtaatcccagctactcaggaggctgaggcaggagaatcgcttgaacccgggaggtggaggttgcagtgagccgagatcgtgccactacattccagcctgggcgatagagcaagactctatctcaaaaaagaaaaaagaaaaagaaaaagaaaaaagaaaaagaaaaggaaaagaaaaaagaggtccatgagtagagtactgcatttgtcaggaaaactactacattagacaaaacttgcctttaatgcctggagatacttgctgctgtcaaaaggtgcacaacttaattttgcctctttggctgatgttccccactattctagatgaactgtgcccaaaaacagatccaaagatatccttccccacagagagttggtgatggatcttaggaactaagtgctatgagcatgttgcaaaaggagatcacagacccagttcaggctccctccagcagccccttctcccatgacctctatgtcagttacatccatgtgctgacagtgggcacacccacagccactactggctaccttcctcctggctgtctctgtgtgttcatgacttttgctggcacatctgtagccccaggtccctttctccagcttgccactcctacatatttttcccttatgattctatgctgtttgccatttttgtttgaaagcagtgcattggttaacaataactttgtagtgatagcaaccaccatagcaataatgtcctgcttccttgtatgcctggcatgtttatcatttaatcatcacaacaccatgaagtaaatactcttattgacccaattctatagatcagaaaacaggcctagaatgtgtaagtccctaatgaaggctacttggctaataaatgacaaagccaaattttgaatccaggcagtatggtttcagagtctttgctttactacctcttttactcactatttttgtactaatcttacactttactacatattttctgaaggcagtcaaaatttaaaagttgattattactgccagtatttatcagtcgcataatgtatttatttttattttctgagacagggtgtcactccatcacctaggctagagtgtagtggtgtgatcacagctcactgcagcttcaacctcctaggttcaagagatcctctcatcacagctactggagtagctgggactacaggcgcatgccaccacaaccagctaatttgtgtgtgtgtgtgtgtgtgtgtgtgtgtgtgtatgtgtgtatgtgtgtgtgtgtatatatatatgtgtgtgtgtgtagagatatatatatatatatatagtagagacagggttctgtcatgttgcccaaactcctgggctcaagtgatccacctgcatcagcctcccaaagtgctaggattacaggcatgagccatcacacccagcccagtaacagaatttaagactactctagtgcagtatgatcatttacatggcatccactcattctttcacttaatctttaccacttattatgtacccactaggtcctagtactgcagtaggcactccattcagttatgatcataacagaaaatattcctatcctcctgaagctttcaggataatggaagggacagataacacaaaaataatataaaatcgcaagttgtgataaatgttacaaaaggaaacagaaagttgttttaagacagaaaatagtaggaagctaacttagattgaggaatgatgatcaaggagaacttttctgaggaagtgacattgtaagttgaggccctaacagaccaataggagctaaccagctaaagaggaataattaagtatgcttttagaggagcttgtatttctggaaaaatagtagactagatgtcaatataagttctgcctaaaataattaaaaatttttaatgtgtggcttagtaggaaaataaggagcatttttagaagccaggaattatgagaaagtctgaatcctgatatagaagtaaattctaggccaggcacggtggctcacacctgtaatccctgcactttgggaggccaaggcgggaagatcacctgaggttgggagttcaagaccagcctgaccaacatggggaaaccctctctctactaaaaatacaaaattagcagggtgtggtggcacacgcatgtaatcccagctacttgggaggctgaggcaggagaatcgcttgaacctgggaggcggaggttgcagtgagccaagatggcaccattgcactccagcctgggcaacaagagtgaaactccgtctgaaaaaaaaaaaaaaaaagtaaattctaaacctgtgtttttttcctctgggcatttgccaatccctcgtggccaaaaccatgggctttaatagatcttgtgcaggagacaaaaggcaaagccaggactctcaaagacttctctctcagtaagtgaactaggagaaaaagcccatccccgccccccccgccgccccccattaacctgttcttcccacagacatgctgttgggataattgcctgtcttaaccttagtgcttgaatgggtgggagtcatatatatcaattatatttttatatgcaaatacatttcatcataaaaagaaaagcataaaactctctagacaagcaatactatattgcaaggccctcagtaagaaaggtatttagcctttttcaaaaaagtaaaaggctggtacacatagaacaaaataagtgctggaaaatgaggttggagatgaagccagggaccagattcatgcaggtccttgaaggccttggttaagagtttgaattgtatcctgcaaatcttttgaagggttcctctctaaagatggaaggagagaggaaactgtagcagtattccaggtgagagggagatatgacttggattagaggaaactggaagaaatgaatggattaaagatacattttgaaggtaaaatgtgtctaacctgctgataaattagatgaaagacttgagagtgagtaaaatataaagggttattcctaagcacctgacttgaaaaactgcttgtccaaaagtctttttttctgagctgaggaagtcaggaggaaatttggaggggggaatgatcaagagttcagttttagaaatattaagtttgataaataaagaatgctaatggagatggtaccactgatataataaaactaaagaggtttttaaaatattcttagttagttgaactcgtaatcgaacaagtcaggatgtaatgataatgaaaacttaccttttataggcaattcaatttatagtaaatttcactgagaggcaaattttttaaagtagaatttcaatgcaataaatacaccattcatttaaattcacattcctgggacagaagagctggatgaatttgcagataaagtaaaatatttggagagagacgctgtggcagagattggctaactgttcaccaaatctattttcttttctttctgctgacacagctggactatatttcccagcctcctctggcttctaaaattattttcttttctgttttataagatgataataaaactctgttctcatagggattgtgatgagcaaactaaaatcagttctgaattgtcaaacgtgaaataaaaattcatttttattagtataggcatgtgactgagactgggccaaggaatgggaataaaagtgatgtatatttcttcctttggtctggttatgtaaaaaaaaaattccttatgcagctttcatgctgtctatcccttgtgtcaactggatattggcacccaaagtgacctcggaagccacacattgagggtgaaagaaccaccttcagttgaaattcctaaaatgacggcatggttcagaatccccatgcctacttttctgccatctgaactttgcataaacaaaaaaataaactattattttaaatcattgagattctgtaattcaactgcttcagcagctagcatatattaaaagatgttaatttgatttcaaggtggtatcaagaacataattttattcccattcatttcttttctcttttttttcaacatgtattttctgtcatacatgaccaggcaaattgagtagattaggatgttaggaggtttgtacagggagtgagggaagctaagatgtttgaggtatgagagaggagttgaaggatatactttctttctatgctccatatcagataatctgtttttctctctccctctgtctgacccagtaattcatttcaaagatgtattcttctgtagctatttctttccacctgctaatagcaccctcattgtaaaacagagacttgatgacaatcttgatctctctcttcttgcccagtttaataatcaagtttttacactgggatacaaaataatcataaatcaaagttgagaaatatgttttcttcctttgtacatctgatagtagatttcatagtatctcttgaggtaaacgcttttgagagtatgcaaagtgtgacatatctctgataggacttgctgaagccagaatgtgccctctgtatctttggccaatggattagccagctagacatactctgacattgttctctgttatatttacttatcagtctttttgcattgttggcttcatcgctccttctcttgagggaaggtatgaggtaaattcagttccctatgctgaacacccagcatgattcctggcaaaatgatattataagtgctttgtaactccttggatgaaaaccaaatgaatgctgaaagtagtgtggtatgtatctgactaataaaaatatgttccaggcggggcgcagtggctcatgcctgtaatcccagcactttgggaggccaaggtgggcaaatcacctgaggtcaggagttcaagaccagcctggccaacatggtgaaaccccatctctactgaaaatacaaaaattagctgggcgtggtggcgcatgcctgtaattccagttacttggggggctgaggtgggagaatcacttgaacccgggagggagaggttgcactgagccgagatcgtgccattgcactcctgcctgggcaacaagagcaaaactcggtctcaaaaaaaaaaaaaatgttccttgtagaatgaattttctgtattattcactataaagaatttatttttaaccacatcaataatatgtctataagatataggtcattacctggaaattgaaaatatttttatgagaaacttctcattatgatgtttattgtgtaaggatcttaagttgttatcacctttgtttgatgaatgtatcttctacttgtgtactctaaaaaattatcagattatttttatgattggtagagtttatagttttgcaagaattgggcaaatctcacacacagggacaggtggaagagcatgcccccatgagagctttaaaggaatacattctggccctgtggagaattgcctcctcttcaattccagtggcatatggttagatttgggcaaacaaatgctatgccaaatatggcatttattgcctcagttcagatgccaggctaggctgaagtttacagctgtgtcctggttgaaattctaaaacaaaaggagtttattcttttaatctagtgtacccctaatctagaatgatggcattgttagcatctagaattattttctttcccattttatatgatgataataaaagctattctcataggaattgttatgagcagacctaaattcagtgctgatttgtcaaaagtgaaataaaaaaatcttttgtctgtgtggtcttaggtggcagaaatgtaattataagtaagccctaatttctgctaggtatactagtgcttgaccctagtgaatggatagtctctttatagaagtagatatattaatccctttaaccccttgaaaactagtagtagtagctatttgatatacctctttccaaaaagtttctagctggccaggctaagttctcatgcctttggtggtatagcatatggacatttatcttggcagtgattacgtgtaagtataaaagaaatacttaaaatgcaataaaatgagcatatctgtttcacaagactaatgtttcttgctaatcatagagaacctaggataaaatgcataatgttgatcattggaactgaggaaagcttaacaattatactatattggataggtgaaatctaggagtttctgtatacccagagtcctttcctaaggggtcctacctgtagcctcttgctaaggataccaactctagctagatacatatagatggccatgttctatattgcatgactttaccatcttgaccacatctcagaacatttgacctaaagcattcaggtagcttgaaggctgacagatttaacgacctagtacaagtgttttatctaactgatgatagtgacatagtggactgatcagatgttctttcttaggaaatttttaatttgaaatagagagtattatttgataggagcaaacaccaactgcttaaccagaaaaagaggcagacaaaaatgacatgggccgggcgctgtggctcacgcttgtaatcccagcactttgggaggccgaggcgggcggatcacgaggtcaggggatcgagaccacagtgaaaccccgtctctactaaaaatacaaaaaattagccgggcttgctggcgggcgcctgtagtcccagctactcggagaggctgaggcgggagaatggcgtgaacccgggaggcggagcttgtagtgagccgagatcgcaccactgcactccagcctgggcgacaaagcgagactccgtctcaaaaaaaaaaaaaaaaaaaaaaaaaaaaaaaaaaaaatgacatgagtcagtagaagccatgaataagcaagagtgacaagtaagtatgagctaagtcatgaacttttttacgtgtgtgtgtgtgtgtgtgtgtgtgtgttggtaggggtgggggtagatacatatatttaaattgtatctgtgggggaagaggatggtcaacaaattgctgccaaggggataaagaactaattacatcattacttatctattggattctgaacaacttgaaattctccatctgtgttcctatacttttcatgagacctggttaaactactttccatgagttcccataaggcctagccacaaaacatacctttgttccttattttcatgtgaaaccttacaatagctgttcccagttacccctctcacatgcacatccacacacagatacttgagacaactttactgagtctctattctttgtggtcaaaggatcctaatttatacagctgttctatgagttcagtgtttattattttagctctgtaaccaaggcaaggactgatgaacaatagcagttttgtggccacccaagaatatattgaccttgaataggaaaaagtaacgtatataatcctaattgtttaagagaggtgatgcattacagggagggctcagagaaagatggctaacactaatagcacatgttggcattgaggagactacgtggaaatgtgcatttagcaaaatagcttcagaacaatattttttctttctcccctattagattttgagttcctgaagcactcatcttggtgtgcctcaccaattcccaggagagggctctgtatataataggtgaaacactattgagtacataatgtggcccagctatggttctgtcttaaggtttagcagcagctttgaactgcctggtaaaaatattttttcaggcagactaaactgaactgaagagagagatacaagttagagacaagagtcggatttccagaaatttctgggagagatagatatagacagtgtagaacagccaagaaactatgggaggaatttcaaggaaccagataatatatgcataatgttggtcatcagaactaaggaaagctgaactattatactatattagataggccattcacatttaggggactaaggaccagaacatactgttatctagaacatcagaacatctgcagagcacagaacagcatagcatttggccagaaagcatgacatagagtatgggatagaggaggagaattggcaaaaaataaattctagattctgatttttaaaatgacagaacaaagattacagcattattttccttctcccttacaaattatccaactgcactgggagagcaacatggtagaaacatgaaccctatcttcaaagaaagatatatgcacaactccagactacaaaatgtgatgaagaatgataaatgcagttaaaaatgcccacagctgcagatctcacacaaagctggcagaactttctagggggcaaaaccaataatgcccagtttatgggataggatttgtgtactagcagcaggagctttcttggccttcctagggtataaagaagaaagcgggggtgctgggcacggtgactcacgcctgtaatcccagcactttgggaggctgaggcgtgcggatcacctgaggtcaggagctcaaaaccctgtctctactaaaaatacaaaaaaaaaaaaacaaaaaaaaagaaaaaaatttagctgggcgtggtggcaggcacctgtaatcccagctacttgggagactgaggcaggagaattgcttgaacctgggaggtggaggttgcagtgagctgagattgagccattgcattccagcctgggtgacagagtgagaatctgtctcaaaaaaaaaaataaaaaaaaaaaagaagaagaagggtaatagactcaatgaggaatcacacagacaagatggaaaacatgggaaacacaaagaaaaaagtagagattatatctttactatcagacaagattgaatttagtggaaaagttttaaataaggcaatgaggaataattcaaagcaacagtatagcattaaacatccataaagcagaaactacagaaaatataaagaataatagttacatagtagtgataagaatgtttattcacttctcttagttcataagagatcaagtggacaacaactgagagaaagaaaacccaaataaaataatgaagtcaatatttgagattgtcaagctttgtatcctgaaaactaagaatgtcaaataaaacattcacaaaaatagaccataaagaaaatttcaaagaatttcaaaaggcaaagtaaatatatacagcattctgtgatctcattgcaataaaagtagaacttaggaaaaagaatatcatcacctggacattttaaatttcctactaaaataattcttagatcagaagaaaccaaacaagttatagaaaatctaaaacaaaagcataatgaaaacaatacatatcagaacttgtgagatggaactaaaatagagttcagaggcacttatcttaatgaagaaagaaaataactccattaaatatctaactcaaagttagaaaaattatcaataaacataaaaaagcagaagaagggaataaaagttataaattagacaaaaattgatcagctaaataaaagagctgattttttaaaaatatgatattaagtttataaaatcaaaaagtagacaggaaagggcataaaccaagaaataatggggaaatgataaaaatagaaaagaagagaatcctaagaaaatattttgttcaatcctgtgcaaattaatttgagaacctagaagaaatggatgattttctaggaaaattgaaaaaataaatactaactttagataactagaaaatctaaactattagcacagaataactttcttttttttttttgatataggaagtcctttattttgtcatgtgaaaccatataacagctgcctaaccacaatgtagatgccaataggagatggctcagaaatagcactagtgactcaaatagtgaccattatgataaaaggaataaagttttgactgatttatagcagttttaaaatgcattttatattgagtagttatttcatgttttctcaaaagaattattatgttaaaccaaaaataaactaggtatatagtttgttcatataacaaatctacattcaaagacatgcttacaaattttccacttagtccatttttctgttcttagcattactacaaatgcctccttccgtcatcatgttgaattcttcagcatcttctatatcatttccaggggcatctctgggaagtagtgatgcctgtcttccttcagaagcactgataaccccaatatacccacagtacacacattttccctctcctgaggtgtgctactttttggcacaacagaaaaaactcattactaggatttgaaaacctaaattctgggcctggttaggtcataaactacagaaccatagatcatatattctccccaggagcctgtttctccactgcataaataattcatatttgcttggccctttgtagtgctttactgtttcatttatcttcatgataacccttaaatttaagtaaggtagcagtatgctcattttatagaagaaattcagtctcaaagaggatacacagtctcccaaagatcccacaatagtaatatattaggcagagctaaactcacacaatcttactcaagatcctagtgctggtacatggtatgctcataagtttgctaaaatggatgaagcagcagtttctcaggtccctttcagtgatcctgttctctgcttccacttgatgttttttctctcgtctctcaactagcattaacatccaaaactatatataatcactaaatttcatttaccatcattttcttatttaattattctttaaatttttctatttccatgttaaatccagagaaatgttactttttcgaaagtttctactgctgcctgcctctctgaaggccatgggacttacctatttgtttgtcaaagcaaaaattcccaacattttgtaaacaccactaattactttttataactgtaaaaacaattattccatacttaaaaccaattcaaaataaaataaatcctcgatacttcttactccctggagtagtaattttaattagattctactgattcgtaattttttcctctgtgcctttatttgggaaatactgttagtctacctcactatcaagtctctttccctaacaagaaaatgtcacagtcttttttttttttttttttatactttaagttttagggtacatgtgcacattgtgcaggttagttacatatgtatacatgtgccatgctggtgtgctgcacccactaactcgtcatctagcattaggtatatctcccaatgctatccctcccctctccccccaccccacaacagtccccagagtgtgatattccccttcctgtgtccatgtgacctcattgttcaattcccacctatgagggagaatatgcggtgtttggttttttgttcttgcgatagtttactgagaatgatggtttccagtttcatccatgtccctacaaaggacatgaactcatcattttttatggctgcatagtattccatggtgtatatgtgccacattttcttaatccagtctatcattgttggacatttgggttggttccaagtctttgctattgtgaataatgccgcaataaacatacgtgtgcatgtgtctttatagcagcatgatttatagtcatttgggtatatacccagtaatgggatggctgggtcaaatggtatttctagttctagatccctgaggaatcgccacactgacttccacaatggttgaactggtttacagtcccaccaacagtgtaaaagtgttcctatttctccacatcctctccagcacctgttgtttcctgactttttaatgatcgccattctaactggtgtgagatgatatctcatagtggttttgatttgcatttctctgatggccagtgatgatgagcattttttcatgtgttttttggctgcataaatgtcttcttttgagaagtgtctgttcatgtccttcgcccactttttgatggggttgtttttttcttgtaaatttgttcgagttcattgtagattctggatattagccctttgtcagatgagtaggttgcgaaaattttctcccatgttgtaggttgcctgttcactctgatggtagtttcttttgctgtgcagaagctctttagtttaattagatcccatttgtcaattttggcttttgttgccattgcttttggtgttttggacatgaagtccttgcccacacctatgtcctgaatggtaatgcctaggttttcttctagggtttttatggttttaggtctaatgtttaaatctttaatccatcttgaattgatttttgtataaggtgtaaggaagggatccagtttcagctttctacatatggctagccagttttcccagcaccatttattaaatagggaatcctttccccattgcttgtttttctcaggtttgtcaaagatcagatagttgtaggtatgcggcgttatttctgagggctctgttctgttccattgatctatatctctgttttggtaccagtaccatgctgttttggttactgtagccttgaagtatagtttgaagtcaggtagcgtgatgcctccagctttgttcttttggcttaggattgacttggcgatgcgggctcttttttggttccatatgaactttaaagtagttttttccaattctgtgaagaaagtcattggtagcttgatggggatggcattgaatctgtaaattaccttgggcagtatggccattttcacgatattgattcttcctacccatgagcatggaatgttcttccatttgtttgtatcctcttttatttccttgagcagtggtttgtagttctccttgaagaggtccttcacatcccttgtaagttggattcctaggtattttattctctttgaagcaattgtgaatgggagatcactcatgatttggctctctgtttgtctgttattggtgtataagaatgcttgtgatttttgtacattgattttgtatcctgagactttgctgaagttgcttatcagcttaaggagattttgggctgagatgatggagttttctagataaacaatcatgtcgtctgcaaacagggacaatttgacttcctcttttcctaattgaataccttttatttccttctcctgcctgattgccctggccagaacttccaacactatgttgaataggagcggtgagagagggcatccctgtcttgtgccagttttcaaagggagtgcttccagtttttgcccattcagtatgatattggctgtgggtttgtcatagatagctcttattattttgaaatacatcccatcaatacctaatttattgagagtttttagcatgaagggttgttgaattttgtcaaaggctttttctgcatctattgagataatcatgtggtttttgtctttggctctgtttatatgctggattacatttattgatttgcgtatattgaaccagccttgcatcccagggatgaagcccacttgatcatggtggataagctttttgatgtgctgctggattcggtttgccagtattttattgaggatttttgcatcaatgttcatcaaggatattggtctaaaattctcttttttggttgtgtctctgcccggctttggtatcagaatgatgctggcctcataaaatgagttagggaggattccctctttttctattgattggaatagtttcagaaggaatggtaccagttcctccttgtacctctggtagaattcagctgtgaatccatctggtcctggactctttttggttggtaaactactgattattgccacaatttcagctcctgttattggtctattcagagattcaacttcttcctggtttagtcttgggagagtgtatgtgtcgaggaatgtatccatttcttctagattttctagtttatttgtgtagaggtgtttgtagtattctctgatggtagtttgtatttctgtgggatcggtggtgatatcccctttattattttttattgtgtctatttgattcttctctcttttcttctttattagtcttgctagcggtctatcaattttgttgatcctttcaaaaaaccagctcctggattcattgattttttgaagggttttttgtgtctctatttccttcagttctgctctgattttagttatttcttgccttctgctagcttttgaatgtgtttgctcttgcttttctagttcttttaattgtgatgttagggtgtcaattttggatctttcccgctttctcttgtgggcatttagtgctataaatttccctctacacactgctttgaatgcctcccagagattctggtatgttgtgtctttgttctcgttggtttcaaagaacatctttatttctgccttcatttcgttacgtacccagtagtcattcaggagcaggttgttcagtttccatgtagttgagtggctttgagtgagattcttaatcctgagttctagtttgattgcactgtggtctgagagatagtttgttataatttctgttcttttacatttgctgaggagagttttacttccaactatgtggtcaattttggaataggtgtggtgtggtgctgaaaaaaatgtatattctgttgatttggggtggagagttctgtagatgtctgttaggtccgcttggtgcagagctgagttcaattcctgggtatccttgttgactttctgtctcattgatctgtctaatgttgacagtggggtgttaaagtctcccattattaatgtgtgggagtctaagtctctttgtaggtcactcaggacttgctttatgaatctgggtgctcctgtattgggtgcatatatatttaggatagttagttcctcttgttgaattgatccctttaccattatgtaatggccttctttgtctcttttgatctttgttggtttaaagtctgttttatcagagactaggattgcaacccctgcctttttttgttttccatttgcttggtagatcttcctccatccttttattttgagcctatgtgtgtctctgcacgtgagatgggtttcctgaatacagcacactgttgggtcttgactctttatccaacttgccagtctgtgtcttttaattggagaattgagtccatttacatttaaagttaatattgttatgtgtgaatttgatcctgtcattatgatgttagctggtgattttgctcgttagttgatgcagtttcttctcagcatagatggtctttacattttggcatgattttgcagcggctggtaccggttgttcctttccatgtttagtgcttccttcaggagctcttttagggcaggcctggtggtgacaaaatctctcagcatttgcttgtctgtaaagtattttatttctccttcacttttgaagcttagtttggctggatatgaaattctgggttgaaaattcttttctttaagaatgttgaatattggcccccactctcttctggcttgtagggtttctgccgagagatctgctgttagtctgatgggcttccctttgagggtaacccgacctttctctctggctgcccttaacattttttccttcatttcaactttggtgaatctgacaattatgtgtcttggagttgctcttctcgaggattatctttgtggcgttctctgtatttcctgagtctgaacgttggcctgccttgctagattggggaagttctcctggataatatcctgcagagtgttttccaacttggttccattctccacatcactttcaggtacaccaatcagacgtagatttggtcttttcacatagtcccatatttcttggaggctttgctcatttctttttattcttttttctctaaacttcccttctcgcttcatttcattcatttcatcttccattgctgataccctttcttccagttgatcgcatcggctcctgaggcttctgcattcttcacgtagttctcgagccttggttttcagctccatcagctcctttaagcacttctctgtattggttattctagttatacattcttctaaatttttttcaaagttttcaacttctttgcctttggtttgaatgtcctcccgtagctcagagtaatttgatcgtctgaagacttcttctctcagctcgtcaaaatcattctccatccagctttgttccgttgctggtgaggaactgcgttcctttggaggaggagaggcgctctgcgttttagagtttccagtttttctgttctgttttttccccatctttgtggttttatctacttttggtctttgatgatggtgatgtacagatgggtttttggtgtggatgtcctttctgtttgttagttttccttctaacagacaggaccctcagctgcaggtctgttggaataccctgcagtgtgaggtgtcagtttgcccctgctggggggtgcctcccagttaggctgctcgggggtcaggggtcagggacccacttgaggaggcagtctgcccgttctcagatctccagctgcttgctgggagaaccactgctctcttcaaagctgtcagacagggacatttaagtctgcagaggttactgctgtctttttgtttgtctgtgccctgcccccagaggtggagcctacagaggcaggcaggcctccttgagctgtggtgggctccacccagttcgagcttcccggctgctttgtttacctaagcaagcctgggcaatggcgggcgcccctcccccagcttcgctgccgccttgcagtttgatctcagactgctgtgctagcaatcagcgagattccgtgggcgtaggaccctccgagccaggtgtgggatatagtctcgtggtgcgccgttttttaagccggtctgaaaagcgcaatattcgggtgggagtgacccgattttccaggtgcgtccgtcaccgctttctttgactcagaaagggaactccctgaccccttgcgcttcccaggtgaggcaatgcctcgccctgcttcggctcgcgcacggtgcgtgcacccactggcctgcgcccactgtctggcactccctagtgagatgaacccggtacctcagatggaaatgcagaaatcacccgtcttctgcgtggctcacgctgggagctgtagaccggagctgttcctattcggccatcttgaaaatgtcacagtcttaagagtcaggaaagcttttactttcactatcacatatgaagaatgaactaaacacctaaactggacagtaaaacttaaatgagggattcaggatatttcccaaggggccatatgacgaatttaaaagttggtatgatgtgcctaaaatagcacgctcttttacttataataaaggtacagatgtagtgattagtcatgctgacatgtacatataaaatatgcctatgccaaattaaaagaaaacaaaatacattctatggcaatcctgaaaagtcagggaggtcaataaatattaagagtatgctctcacaattagcattaaacacatggtaattaacacaatttaatatgtgaaaaatgagaaaatatacaggatgagaagtacacttaggaatttgttgtgattttcttcattttgattgtattgctttcttgtcttcaggagatttcgacttctgaattcgcatctttctgttctaaatggtattcttgggctattttctcagcagttcatgtttctggataaagtttatgattattgagaagtgtcaatgcttctacaatggaaattttgcctttgggaatgatcttaatatttatcatattaaagtgatggccaaaaggcaatctgaattctttcagctcttgacatctttcagcagcttttacctgcatggaagacacaggatctttggaatcaacatacacatcttttagaaatgacagcagcttgtcatctttatgagcaatctctcccttaatttctggatagaaactaatctgctcttgcaggaggctgttggtagaggggtgtctgggattgggagggggcttcatcttgttgatttcccattcctctcagttctctaggttgaaattcctgatcctgcgagtcactgcagcccccatctcctcataacatgatgccctcaggtttacgccacacgtgggaacaccagtgcaggaaacctccggggtaccctagaataactttcttctactgaggccttggtgatttaacaggagaattctaccaaacctttcaggaataaatcaactcagtcttcccaaatacatatgctttaataaatgtggatatctctggaaggacacatgagaaactagtaaacagttattattcccagggaacagaactgggactgagggacattattagaaagaagtcttgctttttcctgtatatcttttataccttttgtgttttgtaccatttgcatatggtactcatccaagtatgaggaatttagaacatctttgttttacatttgaacaagttgacaacactgtttggcttttgttattatgtttaccttacgttttcagtaaatgtagtaggcataatttcttaaatacctcccttccccaaagatgtcccaccgtaattcctggaatcatgatgaatatgatgctctattactgattctgtgattatgttttgccatatggcacagttgacattaaaataggaaattcaagcctacattatctgagtgggcctaatcgaatcatatgagccttgaaagcagagagctttctttggctaatggcaggaaggaaagtcaaagagattggaagtatgagaaggactcagtgtgcaatagctgctttgaaagtggaggagaccacttgagaaagaaggcaagtagttttgaggagctgagggcagctcccagctgacagctagcaagggaactggccaaatccttgcaacctcaaggaactactagctctgtcaaaaacctgaaagaggttgagagtggattcttccccagtctccagatgagagtccagcccaacaggcatcttgatttcagctttgtgataccctgagcagagcccacttgggactcctgacctatggggatgtgagataataaatggatattgttttcagctgctaaatatgttatataggagtagaaactaatagagcaaaattacgttctaaaactttaatacatgtgggctttcagaggctttagagatgggagccatattccctccagtctgggtgtgatgggtagtgccaaagaagctgcagagccggtggaacagtgtcatgtgtcagccagaggctgcatcgtttccattggtgccataagtagaatatgctctgctgtcttttcattactttctccaattgtgcagagaatgaattttttatatctgtctcagtctttccctctttcagattatagtcttagaagcaattttttagcatttctgttttaaataatcttgtattttcaatgaagaagttgccatttctttctttttttttgagacagggccttgctctgtcgcccatgctggagtacaatcaccacttactgcaaccttgaccttccaggctcaagcaatcttcccatctcagtctcctgagtagcttggctacagacacgcaccaccatgcacagctttttttttttttaattttttttgatagagacagagtctctctgtggttgcccaggctggtctcgaactcctgggctctagcagtcctcccacctcagcttcccaaagtgttgggattacaatgtgtgccacaacacctggccttttctttagatgtcttaggaaattaactcctacctttctaaaaattcctgggtttatgtgacctggatttaaatggtcatgagagaaatttctgatatgatagtgcaatcaagtaacactggaattctttgactaccttagtttttctagagtttcacttaaattaacccaattttgttccattggcagttttatccaagactgaataaaggtagtttaccttttaagttgctatacactagaacttacctttcaattaattcttttaatttaacagtgtggaaagctattatttactttttatttaattgatagtacttttgtaaacttttacctgaaaaaagtaactttgagaaccacagagaagaaacatattggttaaggtttctgaagagtgtcggagaattcaagagtgtggggaattgcttctgtgattcccatcacttcacattctgagtagaaaagcacacaacagaaatgctgcaagtcagcatcaggagtccatagcatccatcatcaagtgcaataagactgtgactctctgttactgagttgtgatgctttttctttttgccagtaagttacatggtccagttttttctttcttagatgacttcagggacttgttgtaagcctgctgaggtcaaggaatgcttctgccttatgtgcagtgtattataaaaagatttatctgtgataaaagtggaactcggctgggcatggtggctcacacctgtaatcccagcaatttgggaggctgaggcgggctgatcacttgaggccaggagttcgagaccagcctggccaacatagtgaaaccccatcgctactaaaaatacaaaaaaattagctgggcgtgttggcatgggcctgtaatcccagctactcaggaggctgaggcaagagaatcacttgaacccaggagacagaggctgcagtgagctgagatcatgccactgcactccagcctgggtgacagagcaagatttggtctcaaaaaaaaaaaataaaaacaaaaaaaagtagaacccatgaagaaaaatttaaacaactgattttaatgactgtaaaggagtatcactagtagaaaaatgtttctatattgttaggataatcaagtttctttaaagataatattgatcatttttagcagaagtttgttatttatctttaggaaatgaaattaaatattttgctttgttttgtttttaatgtttctaaaaggaatgaaactgcattattgctgattctgttgtggattgaggcatttagagtagcaaaaattatattaatgctctgtgccaaaacacataaaatggctttatcactgattggtgtctcaattataaaaaggtaataatttgcataatatgataagaatgccacttgaaagaaaggaggctgggttgttttttttttttttaacatccagtaaaacatgattgacatcatctagtcaaattatatattatactgagctttattttctgtataaaccatattttacagatattattttaaaagaaattgaaatcttctgggcttaggtttcagagttatatataactcataagtgagctgtgtgagctgagttccttaaacctaggtctcatttcaaaggctagctttgggctggttgcagtggctcacgcctgtaatcccagcactttgggaggctgaggcaggtggatcacaaggtcaggagatcaagactatcctggctaacacggtgaaaccctgtctctactaaaaatacaaaaaattagccaggcatggtggcgcacacctgtagtcccagctactcgggaggctgagacaggagaattgcttgaacctgggaggtggaggttgcggtgagccgagatggcgccactgcactccagcctgggcgacagagcgagactccactccatctcaaaaaaacaaaaaaaacaaaaaggctagctttgttccaaagcccaaacctggctctggtagactattttctaagctatctcttgatgagctttgctaaaggaaagggaagtatggtacagatcacctcaaagtcatgtttggctctctctgcatttggagttttcctctggcatgtttatattctgaataatgcttctcctaggctaaatacagtttggaccctgcatcttacaacagatgtgacagaggaatgcttatggtcaataatgatgtacagtccacagtgataaagaaattggtgggaatgagactttgagaagtataatgaatgtcagattgcaggctgcccatagtacatccagcatcagcacactgtagtttgccttaactaatttgggcctctgcagctttgggacagtattgcaaataggtggtataataagcttaaataacagatttccatcacttaaatatgaaaatctcagatttgtcacagtaataatattgacctcatgtttttgtttttattttttgttcattgacttcatgaatgaatagtttggcaggaaagcaggtaatacacttccaggccttatattacataggtgttgaggctagagaatgtcacagaggcgtgcccttattcataaaacactaggggaaatgccttactgtgttttattaagcgaagacctttcattgtaaaggtgagattattcctttagaaaccatataaattactgaagggaattatgagcaagaatatattttgggttcatagatgccaaatgcccatctcactggatgattattattctaagtattttccattacctagtttcagctcaggaaatcaattagacccttaagggcctaagcaagcaggaaatgagtgatagatttatagattccaccagtgaatttgaaaaaaaaacttttaccttttaaattataactgcaatagactcaatataaatgctttttttttttttttttttttttttttttttttttttttgagacgttgtctcactctgtcacccaggctggagcgcagtgatcttggctcactgtaacctctgcccccaggattcaagtgattctcttgcctcagcctcctgagtagctgggattacaggcacgtaccaccgcatctggctagtttttgtatttttagtagagacagggtttcgccatgttggccaggctggtctcgaactcctgacctcaagtgatccacccgcctcggcttcccaaagtgctgggattacaggagtgagccaccacacccagcccataaatgccttttttagtgctccctctttctttcctatgtaaacccttttcaagttagattttccctatgatattctcaataaagaacaaattacataaaatcaggaacctgattttatattaagtgtaggaagtcaaattaccattgagcgtaggtcatatattctagtagtagagaccaatctattttctgccttgttctggagggtcatagcaaatctgaaccaggcagccaggtagaccaccactctgatggccccattcaagcttagagcttccccagtctgaaagacactggaggaagcttcttcccaccttatttagctccaagagttcagttgtgctctgtggaacactaggaataactgtatcctagacataaaccaagggcaagacatggttttagtttccatgagggcctttgcttaagagtcagaagggctgctacacatcttaattttgccactgaatagctatgtgataccaggcctttgacataagcagttaagttagaggactccagagggcctgtccagctcttacataagtctaaattccacctgtgatttcataggatccttaagtaagcattccacttctatgggcctcattttctgcccctattaaacaaagacatggctcttgagagcctgtttaaagcaggtttttgaaaagaaagtctcaagtcaaagaaattttgaaatggatttagattaaaaggtatttttgtgtgtgtggagaatgtgggattaactcacttatttttattatgtatagaaatttcagtttgttactatagactatttacagaaatatgagttcttgagtttttcattctgctaccccagatgtgtagcactctgctttgtacatagaaagcacttagcaacttgtgtgttctcttgaatttaactgaagtcccacttgaaaaggtaaagttatataaactactttttagtatttgaagtttctttaagcctatttttaatgatggcttggtgttcatgcaatgacttatttttgtttgtactggcagagcgtagctttttcagttggccagttaaaatggaaagacaagctggacgcagtggctcacgcctgtaatcccagcactttgggaggccaaggcgagtggatcacaaggtcaggagttcaagaccagcctggccaagatggtgaaaccccatctctactaaaactacaaaaaattagccgggtgtggtggcgggcacctgtagtcccagctactcgggaggctgaggcagagaattgcttgaacacaggaggcggaagttgcagtgaaccaagatcgtgccactgcactccagcctgggtgacagaacaagactccctctcaataaaaaaaaaaaaaaaagaaaagaaaagaaagtaagacaacttgtgctcttatttttaaaatattatatacttctagccccatacaaatattctcagattagactaaccaattacacattggaatacctggacagttttaaaatacaactaaaactgaacagaagcatccaaaggtcaaccactgttttactggacataccttttactttgctattttatgtattttatattaaagttagacctttgaggccaggtgcagtggctcacacctgtaatcccagcactttgggaggctgaggtgggcagatcacctgaggacaggagtttgaaaccagactggccaacatggagaaaacccatctgtactaaaaatactaaaattagccgggcgtgctggtgcgcacctgtaatcccagctactcaggaggctgaagcaggagaatcacttgaacctgggaggcggaggttgcagtgagtcaagatcaccccactgcattccagcctgggagacagagcaagactccgtctccaaaaaaaaaaaaagttagacctttgggtttaaaagccccaggataaacacatgaaaaaaactttcaaaatttacaagtgtaaaatatgctcagtacatccttcttcccacccaaccaaacaacaacatctcaagttaaatcaagtggtataaaatgtcaacctagaattctaccactgccccagggaagttctgtctgcccactgtcgtctgcttttacaggtctacactagaaacaacttcccttgataggaagtactgactttgttcagagctgtaaaattatacccagaacctcccttgttcttgttctatatgagtcccagggcctgagagccgccatttatgacgctttggtttgtcacaccctgcacacaccattagagacatttttctctcttggctttgtatctgcttccttctgttgctaccctctccatttcctattttcctaatttttaaaaatgaaatttatttttgctttttcatttgtctaagacttaggctttcatttccccagctgtaaatcaggcattagataataatctctaaagccaattccaatactctgtgaagtcattgtatcttatatttatgagtaaatatagttatcatctttttgataataaattcatcaataaaccatggattggaatacataagaatctgaaaaccctttataaccctcctatctctgaaattcacagatactgctatatagaactgattgatgaatttcaataatatctacaccaacatataattaataatgatatgtattaataatattgataacaatgagacacccacaggtgacttgtcagtaactgatttgtgatttcctaattttaagagtgtgtgtattcttgttgtaatctatgagagcaagaaccttctcaaaataaaagaaagtttttcacagatactaattcagtgactcatttactgacaattttcagtagggtcagaaacaatatcagattggtctgaaattataaaaaatatttttaagagtctaatagttaaaagttaatttggggtgaaaaacaactcctctctataattgtattttattttattgttttattgtttaattattttattgtgtatttttaggcagggtctcactttgtaacccaggctgggatgcagtggcactcattgcagtcttgacctcccaggctcagatgatcctcctacctcagcttcccaagtagttgggattacaggcatgtgccaccatgcctggctaatttttttaaaacttttttgtagagatggggtctcactacgttacttatactggtcttgaactcctgggctcaagtgatcctcctgcccttggcttctcaaagtattggaattacaggcataagccacacactagaccagtaattttaatatactgtatatccatggtcctcaacagggagtgattttgccttgaggggacatttagcaatgtctggaagatattttggttgccataaccttgggttgtgagatgctactggtatctggtgtgcagaggccaatgattgtgcaaagcatctttaaatgcacaggatagctccccacaacaaagagtcagccattccaaaacactaatagtgccaagattgaaaaactcttccgtatgtgactgtgtgactcaactgagttctatgatttggagagtcttttcatatttaattctagaggttgtgaaaataaaatgaaggtcattataatgtcatagttcagccatgtgtaccattaccaactgcttgctgactcttggccttttatccttacctagactattagaccttcacaatggattcttaagtctggcctgagacacttattattactacaggaaaacaaaaaagaaagcaaaagatcctactatctggtaataaatgtctcatctgagcaggtttaaagatcaaataatctttgaaaaataacaattctggctattattaaaaagtcaaaaaataacagatgctggtgaggttgttgagaaaaaggaatattttacactgttgatgggagtgtaaattagttcaaccattgtggaaaagatagtgtggcgattcctcaaagacctaatgacagaaataccatttgacccagcaatccctttagtggttatataacaaaaggaatataaatcattctgttataaagacacatgcatgcgtatattcattgcaacactattcacaatagcaaagacatggaatcaacttaaatgcccatcagtgatagactgtttaaagaaaatgtgaggccgagcgtggtggctcacgcctttaatcccagcactttgggaggccaagacgggtggatcatgaggtcaggagatcgagaccatcttgcctaacatggtgaaacgccatctctactaaaaatacaaaaaaaattagccaggcgtggtggcgggtgcctgtagtcccagctactcgggaggctgaggcaggagaatggcatgaacccaggaggcagaggttgcagtgagcggagattgtgctactgcactccagcctgggagacagagcgagactccatctcaaaaaaaaagaaaatgtggtacatatataccatggaatgctatacagccataaaaaagaatgagattgtgtcctttgcagggacatggatggagctggaggccattatccttaacaaactaacaccgaatactgtgtgttctcacttacaagtgggtgctaaatgatggtcacacagaggggagcaacacacaccggggactaccagagggcagagggtaggagggagaggatcaggaaaaataactaatggatactaagcttaatacctgggtgatgaaataatctgtacaaaaaaaccccatggcacacgtttgcctgtgtaacaaacctgcacatcctacacatgtacccctgaacttaaaagttaaaaaaaaattagaaataacaatttttatatagcagtatgctttaaaatgatgtcatggactgttaaacttcagtagacttgaccaatcatttagtccaatgctttttttttttttttttttttttccaaataaagtaagagcctcactatctaagctcacatggtatattggttgcaggattaatacaaggaggcatgattacatgatcacaatccagacacaagtcacctccttcatgacaaaattcatcacaaatgtaggttctttatgtggttcttatatggccctcactagcttttgcatcaaggtttgctcagtgtggactttacgaaaatcaggaaggagatgatttagtgagtaaggggattagaaattgtatcctggcaccatttacacaactcgcaacacaatattaaaaaatgactagggagacggaggtggaaggatattttatttatataaatcttagccatgcccagtggtacacacctactgtcccaggtacttgggaggctgaggcaagataagttgaggttgcagtgagctgtgatcatgccactacactccaatctggataacagagcaagaccctgtttaaaaaaaaattaaaaatcaagtgattttttaaaaatgaagaaaaggacaagtagagaggtagggtggggaattttcccttgaatcctcaaaataataaaactgtatattccactttttatctccttccttcacaacatttgaaattccacagtaattttcccttcggttatttgcctatttcctttttaatggtttccattgttatacccagtagattaaacaacattcttctttacttattgaattgatatagtaagatctgcaaaaaaaagttattccaaaatgcttatagtaaagaacaaagtttttagggatctaatagtttctttccttcccaaccttattgagatataaatgacaaataaaaattatttatatttaaggtgtataacatgatgcatacattgtgaaataattaccacagtcaagctaattaacacatccaataccccatatagttaatgtgtgtgtgtgtgtgtatgtgtgtggtgggaacacttatgatctagcaaatctacatctcccttaccaaacttcaatatacagtagagtatcatgaacttgtagtcaccatactgtatattagatcctcagaactttgtcatcttataactgaaatttgggccctttgagcaacatctctctatcttatcccccgacaaggagcaaccaccattctactctctgcttctgtgagtttgacatttttagattccatctgtaactgaagtcatataatatttgtctttctgtgtctggcttatttcacttagcataatgtcttccagcttcatccatgttgtcatgaagggcaagatttccttcttttttatgactgaataatattctattatgtatatctataaatgtaaatatatataccaccttttttgtatccattcatccatcaacagatgcttaggttatttctatatcttggtcattatgaataattctgcagcgaatgtaggagtgcaaatatctcttcgagatactatgctgatttcattacctttggttacatatccagaagttggattgctgcagtagttccattttttatatttgaagatcctctgtactattcttcatagtaactgggccaatttacatttccaccaaaagtgtataaaagttctcttttctccatatcctcactaacaattgttatctctttttttttaaataatggccatcctaacaggtatgaggtaatatttcatggttttgatttgtatttccctaatgattaatgatgttgagcaccttttcatatacttgctggctgtatttatgacttctttgggaaaatatctattcaggtcctttggccatttttaaattgggttatttggtgttttgctgttgagttatatgaattctttaaatattttggatattaatccctcatgagatatatagtttggaaatattttcttccattttctaggttgcatttccattttgttgactgtttcctttgctgtgcagagctttttagtttgatgtagtcctacgtgtttatttttgcttttattgcctgtgcttgtgtcaaaaaatcattgccaaaatgagtgtaaaggagtttttcccttaagttttcttctaggagttttgtgatttcaggtcttaaatttaagtctttaaatatttcacgttaatgtttgttatggtataagataagggtccagtttcattctcttgcatgtggagatccagtttttccagcaccgtttattggagggactatcctttccccattgtgtattctccttggtgcccttgtcaaagagagatctagtagtttctaagcagcatcatgaagctgtatctttactgatttcatgttacaacaaaatttttttaagcacaaacccaggggtgtgacataccctgaaactggtgatttgaaaaacagtactgttagagaaagggatctatggagatcattgttagtagtagtaattggggcattggatcaggataccccagttatcctgatccaataccttaattatataattaagtttttaagtgtagaagtgggtgtaatgatcactgttttgataaaattaaaatattaatgtgttaaagtacccatctcatttggtgctagtagaaaacgaaatgcataaaaactattgctaaaagtcactaaacctctcttacagcctaattagcaagttaatgctttttccttttggctgttccctaatttttcattcaatttatcttttcctgaaaacctgctaatttcatgcactttagccctacggaagaggacgttgcttagcaactgcctaaataactaatagacctaggtatctagtaaaggcttgaaggatttacttattttaaatttatatatttgtgtattaaccatcaaatccaagaggaagttgtttcactttggtatttcttcggatttctgcatttttatgattaattcttttcttttttttttaaatggagtcttgctgtgtcgcccaggttggagtgcagtagctcgatcttggctcactgcaacctctgccacctggattcaagtgattctcctgcctcagcctcccaggtagctgggactacaggcgcacctaccatgcctggcaaatttttgtatttttagtagagacggggtttcaccatcttggccaggctgatctcgaattcctgacctcaaatgttccacccacctcggcgtcccaaagtgctgggattacaggggtgagccactgtgcctggcctgcatttttataattaatttgtacatgagttgtttgtagcaaaaaaaaaaaaaaaaaaaaaaaagaaaaacagtatatttaatgggaacttcttttttctcccttcaacctcttagtaacattgctgtatttgtcatttactttagttaatcttttctaacagaataccctatcaatgatatttgctgagttaagaaatgttttctgggccgggcgcagtggctcatgcctgtaatcccagcacttttggaggccgaggcgggtggatcacgaggtcaggagatcgagaccatcctggctaacatggtgaaaccccgtctctactaaaaagacaaaaaattagccgggcatggtggcggacgcctgtagtcccagctactcgggaggctgaggcaggagaatggtgtgaacccgggaggcggagcttgcagtgagccgagatcatgccactgcactccagtctgggtgacagagcgagactccgtcttaaaaaaaaaaaaaaagaaatgttttctggccaggcacagtggctcacacctgtaatcccagcactttaggaggccaaggcaggcagatcatgaggtcaagagttcgagaccagcctggccaacatggtgaaaccctgttgctactaagaatacaaaaattagccgggagtggtggtgtgtgcctataatcctagctactcgggaggctgaggcaggagaattgcttgaacccaggaggcagaggttgcagtgagccaagatcgtgccactgcactccagccttggcaacaaagcaagactctgtcacagaaaaaaaaagttttctaattcactggatacagaattctataatatttctttttaatggtaagctaattattttagaggaaatacattaaggttttaggagaaggaatttagaaattaaattgaagtcgttgctattacctatacatgatggttttacttttggttgtttgacccagaagtatctcagaagctcatctgagctaagggttttctaaggtttgagggtatgagtggtgctgtcattttgcaatgtcctgttatacttaatttagccttggtgtgtttacttgtctgaggttaagtctccccactatgacatataaagctgtattattatccaaatctcagacctattttcttcactcttatattagttcattctcacgctgctaataaagacataccagagactggttaatttataaaggaaagttgtttaattgactcacagttcagcatggctggggaggcctcaggaaacttacagttactgcagaaggggaagcaaacatgttcttcttcacatggtggcaggaaggagaagaatgcgagcaaaatggggaaaagccccttctaaaaccatcagatctcatgagaattcactcactatcacaagaacagcatgggggaaccacccccatgatctggtcacctcccatgaggtccctcccccaacatatgggaattacaatttggattacaattcaatatgagactttgtctggggacacagccaaaccatatcaactgtgtttctgttcaactgccctgaagtaaaaacaaaataccagcaaattttcttactgcaccctttgcattctgtggtgttgagacattaaagaccatttgcatcaggctagtgtggtggctcactcctgtaatctcagcactttgggaagcctggggagaggatcacccagagctcaagggtttgagaccagcccggacaacattgccaaaccctgtctctacaaaacctacaaaaattagctggatgtggtggcacacacctgtggtcccagctacttgggaggctgaggtgggaggatcaccgaagcccgggaagtttgaggctgccgtaagccaagagattgcgccactgcactccagcctgggtgacagagtgagaccctgtctcaaaaaaagtaaataaataaataaaagaagaccacgtgccacttgcacaaatatattagcagtaaaaagaacacatagttgggcatgatggcacatgcctgtaatcccagctacttgggaggctgaggcaggggattatttgaacccaggaggtggaggttgcagtgagccgagatggtgccactgcattccagcgtgggtgacagaacaagactccctctcaaaaaagaacacaggcaacttatattaatagtgttaagcgagtctacattaaagagaaactgtgctttcaaagagttacttttgtctcagaatgaagctcctttacaaaatggctgctttagaattctatcttgcagagaggctttgggcaaatttatagcatattttctttcacaggcaagaactcctaagatatcattttgtgtaatgattaattatcctctatagatatcagagatttttttttgttttaatggagtatcttcagtaagacattaccctatcataaaataaagtgtatttaaagcaatattgccaggcacagtaacttgtgcctgtggtcccacccactcgggagctgcggtgagaagattgcttagcccaggaattcaagtctggcctgggcaacatagcaagaacctgtaactttttaaaaaaggaaatattagattattagtagctatagtaactataaataatagaacatttcatctacaattgactaatatagagcttatttataaactgcaatctgtaagactgtatgtatcatgttcacatctcaactgtgctcatatctcatttgcattgtcaaccactgtacaaagagaacaatgtaggataactagagtgaagtttaaagattcatacttagtaagttatctgatacaaagacaatatctgccaaatagtttaggacaaaaatgatttttaagagatatgtatctttgagagagagtgaaggagaggaggggagagggagggagggggagagagagagagagagagagagagagagagagagagagagagagagagagatgccagcctgccaatattcaaagagtttaaacttcaaccataacgtttattttttctccttctctcatctttccctctatatctatctatagaaatataaaaacatattttagatttaacataaaaaattaactgtcattcaaatgaatgaaattagaatgttctgggcattgccactgccaccactatgacagctgttttagaattatgaaaatctttttattattttattttagaccattaagcaatttactattgctcttaaagcatacataaagccaatttttaacatcatggaagccatcgctgacaagaatgttgcctcaattcacatgatattttctattatagcagtctgttaatgtgtattgcattcatcagtaacttgaggaggaattgataaattgccttcagtcttctttctcctcatatttgcgaatgccttatataataaatactactacaggccaggcatggtggctcacacctgtaatcccagcactttgggaagctgaggtgggtgaatggcttgagtttgtgagttcgagaccagcctgggcaacatggtgaaaccccttctctactaaaaatataaaaaatgagccaggcttggtagtgcatgcctgtagttccagctacttgggagactgagagaggaggattacctgagcctggaaggttgaggccacagtgagctgtgatcgtgccactgcactccaccctggacaatagtgagaccctgtctcaaaaaaaaaatttttttttttaaatttaaaaattagctgggagtggtggcgcttgtagtcccaattactgtggaaactgaggtgggaggatcacttgaacccaggaggttgaggctgcagtgagctgtaaatgcatcactgcactccagcctgggcaacagagagaaaccctgtctcaaaaatgatagatagccagccatggtggctcacgcctgtaatcccagcatgttgggaggctgaggcggccggatcacgaggtcaggagttcaagatcagcctggccaacatggtgaaaccttgtttttactaaaaatacaaaaattagccgggtgtggtggtgtgcgcttatagtcccagctgcttgggaagatgaggcaggagaaatgcttgaacccgggaggtggaggttgcagtgggccgagatcgcgccaaaaaaaaaagatagatagatagatagatactgttggatgcaatataagttttcagcccatattttcgttatataaggatacaacattaagagcaaaatactaagataagagaaatatagagtctaccattagaaattttaaaacttctatttcaggatttctaaatgggctattcaaaagtgaattgaatctcctgtcttttctcttgctttcatttgtgacaaacctgatgtaggtgggaaaaaacctgagcctttgtaatcacatgtttgggtttaatcataactctcatttagtagtagtgtgacttatttatttatctgagacagagtcttgctctgtcacccaggctggactgcagtgacatgatctcagctcactgcaacctccacctcctgagttcaagcaattctcctgccttagcctcccaagtagctgggattacaggtgcatgccaccaggctgactaatttttgtatttttagtagagatggggtttcaccatgttgttcaggctggtctcaaactcctgatctcaggtgatcctcccatctcggcctcccaaagtgctgggattacaggcatgagccactgagcccagccaaagtagtgtgactttaaattgcttaaactcttttttttttgatggagtcttgctccgtcgcccagggtggagtgcagtggcacgatctctgctcaccgcagcctccgccgcctggggttaagcctcagcctcccgagtagctagaactgtaggcacccaccaccatgaccagctaatttttttttgtatttttattagagatgaggtttcaccatgttggccaggctggtctcgaactcctgacctcaggcgattcacccaccttagcctgccaaagtgctgggattacaggcatgatttccatggcacccagcctaaattgcttaaactcttagagcaagtatctcttctgtaaaattgggataattaaatctgctacaaagtattgtgtaagaactaaaagagataatgaaattatggctcctccctagcacagtaggttttaaatatgtgttatttctctcccccttccccatttacctctgatggaaacttagttgacatctttgaagtgaagtggtttgttggtcagttcttagtttctgagttagctgctactctaagccattgcacagggtatttcttttgactcaagataaaaatgaactgtggaaaaccttattataatatagttatgaagaaggattatttattttcacatgatagcccatagtaatggtgttttgttgatcaggttacaatagattaatatcattatataacaaatgctcttttttccctgttcttttcatagttgttcaatttaatgagaggtaattgattaaattctgtttgcattgtagtcaggaaaccggagagggcagcaaactgtaggagattgtgccccaacgccccacccaggcctccctatcaagacttcacctccactaacctgtctcagtcatttctaacagaaggactcatgtaaattaccaaattactcccaaataaatcagtgtccagaaagatttagttgtttatggaaaattggtagaggattgaaattgtatgacactgttattcatctctcctggacaaggaaatacgaaaaaaaaaaatggaggcattggttgtgttctcgtatactgagaacctcactccctgccccatttctaaaggttacaattccatcttctctttagttttcatcaaatagttttgccccctgtacatcatttttattaatattgataataacaaccaacatcaatcaaatgctttccagagtcaggtacctcactgcattgttactattttctcgttttgtggatgatgacatggtttggctctgtgtccctgcccaaatatcatctcaaattgtaatccccacatgtccagggagggaggtgagtggatcatgggggagtggatcatgggaggtgagtggaacagcatccaccatgctgttcttgtgatcctgagtgagttctcacaagatctgatggttttataagcatctggcatttcccctgctttcccttctctctcctgccgccatgtgaagaaggtccttgcttccccttcaccttccgccatgattgtaagtttcccaaggcctctccagccatgtagaactgtgagtcaattaaaactctttcctttatgaattacccagtcttggggtttttcttcgtagcagtgtgaaaacggactaatacagatgagaaaaccaaggagtgagacaacttatgtaatttgctcattgtcactgctatagactgaatgtttgtgtccccccaaaattcacatgttgaaatacccaaatgtgacgatattaagagacgggatctttgactggtgattagatcatgcgggttaagttctcttgaatgagattagtgcccttataaaaaaaactccaaggagaccccttcctcattctaccatgtaaggacacagagagaagacctctgcctgtgactagaaaacacgctcccaccagacaccaaatctgccagcaccttcatcttccacactccagaaatgtgataaataaatttctgttgtgtataagttatccagtctatggtattttattctagtagcagcccaaacagactaagacagtcacatagccagtgagtggtggagcccagtatcaaaccaggttattctaaattctggagcccacacttcctttctctaatggcataaatggaagctagaaaggcaggaatttagtaatcttcaatgactggctttggcctaatttgttgacctgatatttgcaaattaccataggctaatttaaatctgcctttgtaacttctgctgtgtccagtatcagtttaccactctggtcattctaaattattttttccctgtaaaaaattatttcactttgcctatctaaattcaatccatcttttccatgaaggcttccccatctgcagagggacttcattctattacagtcctatatcactaattattgtattacatgacagacatagctttttttatagtctgtaacctatgtatgtgtgtgaaggagacatcagtgtttgagaaacagcagtgtttggcacatggctaattctggtatatgtttgcctacttccttatcctttagcttgcacactagaaacagacacacctgttttttaatcctagcagctctatttctagctgtaggtatcgagtcaaatcacaaaacttctccatattttaattatctacaaaaaaggaataattatggtatctagtttattgatttacagtgaagatgaaatgagattttgtgtttaggacatagtgaatacttattaaatattagctgccactattataacttctttttttttttttttgagatggagtctcgctctgttgcccaggctggagtgcagtggtgcgatcttagcttactgcaagctccaccttccaggctcacgccattctcctgcctcagcctcctgagtagctgggactacaggcgcctgccacaacacccggctaattttttttatatttttagtagagatggggtttcaccgtgttagccaggatggtctcgatctcctgacctcgtgatccacccacctcggcctcccaaagtgctgggattacaggcatgagccaccacgcccggcctattataacatttttagtaaatattcattgttatagattatttgtattactagattacaaaatctgtaatcccccttatgcacattataagcatttagtaaatgttgagttttttgtttgtttgtttgtttgttttttgttttgaaacagagtcttgctgtgtcacctaggctggagtgcagtggcgcgatctcagctgattctcctgcctcaggctgctgagtagctgggattacaggcatatgccaccacgcctagataatttttatacttttagtagggacggggtttcaccacgttggccaagctggtctcgaactcctgacagcgtgatctgcctgccttggcctcccaaagtgctgagattacaggcatgagccaccacacctggcctgagttgcttttttaaaataaataaagatttaattcacataccatcaaacttgtcaagttttaactgcaggttttaactgcaggatttaaccaagtgccctgctgtaaactgccagtatataacataatgcaggcatgtgaggtcccattggaaagggagttatccaggctgggagaaaaacttgagagaaatgggcacttgcatgaaatcctattgctgttccctaaacctaccctctgatcttatgaaaaaacgaatatcatgtgaaatgatttcatttcatttgattgttagtgaaatgttttaaataattatttgaatgctttagaaattaatgtatcgttatttgtaattagaattcagttgtgcactctgctcaaaatgagacaaagtgaagcattactcatgttttcaggtaagtatgaaactcttcattttgagtgataacaaatatcggtgaatgcttacaagcacttgaaacatttacttttggttaggtaaaatttaatgtgaatgtgatggcggtggattttagtttcaaatgaggtaaaaagctgaattgttaaagagttgcatctattctttcatagtctggaatctacctcaccctcattctttgtggtgagttgcaaatgaggcagcaagatacccagcatacctgttaagcaagtatttatgtcccactggtttttctttttttagtttaatgctaggttttttttttctttttttgaacaatctgttttctgaggttttgaattttcctagcaactgctaggagagataggaaggataatgagctgaatggctggtattcaacacaagaataatggtgttctttatttacctttgcataattttaaagagaacaagtttacttatcttttacttgttcttttcccattgtaaaaactcagtaggtgttactagactattctgaaatacaaattctgaaaagctttcttctgatatttctatggtttctcattcatattttctcttttgttacctcacttagagcacatgggctttgtaatgtacactgctaagagtagatagaaacctgcttggaatattgattttctgtaattaagaatgtatttatagaattttatctttcttatagttctattttttttttttttaagaggcagcatcttattctgtcacccaggctggagtgtagtggcacaattgcagttcactgtagcctgaacctcctgggttccccgcaaatagctgagactacaggaacttgctaccatgcctggctgatttttcaattttttgtaaagatgtagtctcactatgttgcccaggctggttttataatactgggctcaagcagtcctcctccctcagcctcccgggattatgagtgtgagccaccacaaccagcctttcttatagttatttatctcactgtgaacactgtgaacattttgtcattttggagatccttaacattgagtcatgtatactttgtgaatgtttgcatagagttacctaggaacatctggaagaatgttcatgaaagattagaggagggccagtcatgcaggaggaacagtttctccagggtgctacccatctatatgggggttgcagaagacctttctgccctctaaaccatatttcctttttttatttctttgagacagagttttgctctgtcgcccaggctggagtgcagtggtgcaatctcggctcactgcaacctctgcctcctgggttcaagcgattctcctgcctcagcctccagggtagctgggactacaggcacacaccaccatgcccggctaatttttttgtatttttattagagacggggtttcaccatgttggccaggctggtctccaactcctgacctcgtgatccacccgcctcggcctccaaaagtgctgggattacaggcatgagccaccgtgcctggcctaagccatatttctcttgtagttgttttgtctttctttctgtctgatcttgattttatgggtgacgtgatgagaatattcaacaagtagaatatgagatataggaaaaaggtcttgactgctactctcctgagttgagataattttttttttttttttttccgagatggaattctccctctgtcgcccaggctggagtgcagtggcacaatcttggctcactgcaacccctgcctcccgggttcaagtgattctgcttcagcctcctgagtagctgggtctacaggcgcgcgccaccacgcctggctaatttttgtatttttagtagaggtggggtttcaccgtattggccaggctggtctcgaactcctgaccttgtgatccacgcacctcgtcctcctaaagtgctgggattacaggtgtgagccactgcgcccggtgaggtgagataatttttatacttgctgctttgactgatgtataaaaaaatgctactcccataatgcaactactttgctgcattggagagaacacaatagaaaaatagccacttcttattcaagcttttcttgatttttgtttcggctgtctctaaatttgacacttgagaatagatggtttatttgactcatagtatgacccaggtatgcttttgttaaaaagaacagttctaggaggatgactgttgggacaaaattagctactagtatggaatactctttcagtgtaaaatctcagaacaacatttaaaaatcattggagatattttattcataaacattttcttaataagatccagaaagggtttataaacctaataaacctattcgataggttctatcaaataaacctatttctatcaaataaacctatttgatatcttctatcaaataaacctatttgataggaggaaataggaataggacacattgcttttgactttctatacccatgtggaaaccaggaatctattctctccctctcaatttacatgaccatgaggaaactgaaacctagcgaagttaaatgacttgcccggggacggacagctagctagttcctgcttgaactgaggaccatctatttggttaccgggagtgtggctggtttctgttgcctgttttgatactcttctcctggtaagttttagcttcaaatggtattgtccacaccacagcccttgatctcaggtaattctccacaccactgcctttttttttttttttttttttttttccaatgcagttgcgtggtgtgaaggcgataactgcagacactcaggtgtaaacaacccagggaatcaatgggttggggggatggtaaaacaggagttcgtagacaggactgtgtacaatagcttctgaagttttggagggtattggtgtagctgttatttctgagaccggagaaaatgacggtagagtgacagtttctctaatcatcagttttcaaagagtatgtttttcgttggaaccacaaatatagtacacttaataaggggaaacgaaaccttgaatttttccttcccagactctgaaaagtaaagtaaactttaaggaacattttaagggtgacaaaaggtgaagattgcaaatcaaacttagagtgtccctgctcaagaaaatctgtgcactgcagctacaatagaggaccacttgggtttagaaatgacatgttattaataattctagtcactgtggctaattagaacaatctgttgaaggttataaattatagaagctttttaaaacatttatctaagaacctgtgtagaattctaaaaggactgaattatttgaagttattagtttctgtgtatgtaaacttaaactatttttaaagcctttgattatttttctaaaaatgtttttgcatgcttatagcctgatgccgtaaatgttttatgagtttaatgtacagcacctctaggtgctatttaaaattgttttttctggtccttttcttttgggttataagggttcttcgtaaccaagaagattacctatggttacgctgaatgcactctcccagggtgcataggcgctgctgaactgcggttataactcttgtttgcccctgggtggttgccagcagggagtaaggcattgtgggaagtactttctttaccttccacaacaggtgtctttgtcagtgcaccttattcagatatccatgtgtggaagctctgagtcactgaatagcaaagaaaaatatgaaagcaagaggaattgctttcacatctagaaaatgttgcaagataatctgaaatcttctggtgctggtgaatgcatgaagaggttcacagtatcttttaaagtacttctgaaaagataaggagtttaaaaggtatgaactgcctggacaccttataatgccttgtctcctgattatcatttaatttttacctggttagtcagagtcaggataaatgtgcaggaaaaaaatgttaacgaaaataatgcttaacagacaaagcagcactgtagaacaaaaatgaagtaaaaatgctttactgactccaacaagggtcaaacacagtttgaagctgttttaatcttgtggatttatttaaaatattgcatttttttgtttaaataagcttattagatttgcttgtttcctagcaatcaggtgcttttccctccttccttgtgctcgctcttataagctagaatgctatagcagttgtaaaactctactaattacatttaaatgggacaaggtgttatacaagtaatcatgttaatgtagatgaaaaaaatacttttggaaaacatgggaaaataacactatagatctcattctgagttttgttttctgaaaagcaaacaaatttaggtaacataatcctgctattggtaatgaagactaaacatttcaactggttgaaatgttttatttcaacttatttcttttgattttagacgaacttgccaaattaatttctagttctaacaaagaatatttctcatagtaagtactgcagtgtcatgatctagaaaaagcagggaagatactagcttaattaggaatattgaaaaacaacttcagagaagccttatctgtcttccccttatttttatttgcttaatcctttttccatgaaattagtatacattatatttcctgatcaagcaactttgtaatggtgattatgggcaactttcaaacttttcatctggaaatatggcagttcatttatggtctccagctgtaatttaaaaagcactactggtggttaagctaccaacagttaatggctatctactgatttgaataattaaaagaaacccctagccttaaagataaaagatgaagagaacttttatctatgggagcaaaacaaccagtttataaatgagactcttgtattgctttctgaataacaacacaaaactatgcttaaaatacttattttttttagtaggaaaagggagtaatgattattaattgatatcgctgtccctgtttcatttttatgttttggcatttttttctttaacagaaatactcagaggggaaaattttttttttcagacttcaggagatcacttgtactatgaattctttaaattctgagaaattaaaatggttttcatctgtttattttctaagattacgaaaaaataagcgttaagaacactaagaaaatttacttcttctccaagaacaatcttcatgtaataatactgcagtaagaagatgagctattatgaaaatttttaattaccaagaacataacacaaatcagttttttttgttgttgttattgctataggatatttctagttaggaaactttatttcttttttgaagtttaaaggtttccaaaaattgaattttccagcttctctgttataaatgcagaaggtgtttatagtgtatacttcctgcatagataagaaacctcttttagtttcctactgggggtgaattgctagccaagcctgtgatagcagccgctttttttttctttctctttctttctttctggatttttgacactccaccccctcgaactcaggtgggtgtgtacactggcactgagctgcagtaggatttttccttggatagtctggtctggagctgggacagcagctgctgctgtggaaaggccagctggcaagatgatggaagaaatctccattatggtagcctatgacgcccatgttttcagccagctgcacgatgaagacttcctcactagtctggtggccatcagcaagcccaggtctatggtaggtggtgccttgcacactactctggttctgtattttcttttctaacatgatatctatactcctgtagcaactgaggcataacttgctgttggctttgtgttatgtctacaggttttcaaagatttatttacataattaaacactcatataacagtagcacacttaaaatgttaggctgatgctttcatatataatgaggttgagaggaattttagagtgccaaatatcactttgtcttaagtttctgccttgtaaatatgtatataattatcaggtaggggctagttatatttacatagcatacaattgaggctcatagaagtgtaacgtttctaccagtgagtaataacatcatctgagaattgagctacctaaacatcaggtaactttcagggtcttaaattattactaagaagaactattaggaaaataacagtacaattttagtttggctttaatatttgtaaaaaaaatttgccattctctcaggatcttagtgtgtgtgcatgtcctggcataatcaaaaacggaagttcttgcaagtgtttattgtttcttctcttagatgtcatcattataatggctattgagtttaagatatcaacgatctatacctctgaaaccaacttttttttgagatggagtttcgctcctattgcccaggttggagtgcaatggcatgttcttggctcaccgcagccgttgcctcctgggttcaagcaactctcctgtctcagcctccctagtagctgggattacaggcatgcgccaccatgcctggctaattttgtatttttagtagagatggggtttctccatgttggtcaggctggtctcaaactcctgacctcaggtgatccgcctgcctcacctcccaaagtgctgggattacaggcataagccaccacgcccggcccccaaaatcaactttttaactacaattgtagtaacttcttattatatttaatatgactcatcacaaacaacagaatgaaagagtatatcataacatttaaacctaactaatatgaagacctacttctctattttaaggcacaggaaccttaaaaacatggctatttcttgaaacaacaaattacaaaaaataaaaataaaaaaataaaggagaaagctatagattgattttaaaagacttaagggttatatcaaccagatgcaataaatcaacgttgtttaaatgctaatttgaacaaagtataaaaagaactgtaagataattgagaaaaatttgaatttgaccactcattaggtatttaataatgatattaagagaattatgtaattttttgtgcattgtttttttttttttttttttttttttgacatggagtctccctcttgttgcccaagctggagtacagtgacacgatttcagctcactgcaacctccgccttctcaggttcaagtgattctcctgcctcagcctcctgagtagctgggactacaggcacctgccaacacgcctggctgttttttttttttttttttaagatggagtctcgctctgtttcccaggctggagtgcaatggcacgatctcagatcactgcaacctccgcctcccatgttcaagtgattctcctgcttcagcctcccaagtagctgggactacaggtgcacaccaccatgcccagctaatttttgtattttagtagagacagggtttcaccatgttggccagggtgggctcaagctcttgatcttgtgatctacccgcctcggcctcccaaagtgctgggattacaggcgtgagtcacggtgcacagcctttttttttgtatttttagtagagacggtatttcatcatgttggccaggatggtctcaaacttctgacctcatgatccacccaccttggcctcccaaagtgctgggattgcaggtgtgagccactgcacccggctgatactatgatttttttaaatggtcatttagagatatatattgaatagttttggatgaaatgtctgcagagattcaaaatgaaccagtagattatgtgttgataattattgaaactgggtgataagtattaatacatagtgattcattatattctctccacttttgtagagatgcagtttaaaagaatcagctggaagacaaaaaaaagcaaaaagatttgcaaaaagcaaaacagatataaaactgtaatataatcaataaaactgtaatatactcagccaggtgtggtggaccactcctgtagtcccagcacttcgggaggctgaagcaggcagatcacttgaggccaggagttcaagaccaacctggccaacatggtgaaaccttgtctctactaaaaataacaaagatcagccaggcatagtggcgcatgcccataatctcagctactcaggagactgaggcatgagaaatgcttgaacccaggaggtggatgtcacggtgagctgagacagagcaagactctgtctcaaaaaaaaaaaaaggaaaaaaaaacaccataatatctttctggaagtgttaatagagaaacatctgacctgttgcatgctttccttgtataatatacataatttatgtttttataattacatatattatatgaagattattgccaaccccctagttaactacaatatacactataactgaatcaggataggataatccacggttgtagataatctttaaattttattttagtcattgattttacaatattccaacatgaaagcttatccagagaattcagaatatggccacgtgctgtgactcatgcctgtaatctcaacactttgggaggccaatgcaagaggaagaggattccttgaacccaggaattcaagaccagcgtaggcaacatagagagacctcatctctacagaaaaaaaaaagaggatcttgagaggaccatcataaataaacagaattctctttttttttcttttctttctttccttctttctccctccctccctccctctcttccttcctccctgcctctcttccttttttgagacaaggtctcaccatgtcaccaaggcctgagtgcagtggtgtgatcatagctcactgcagcctcaaagtcctgggctcaagcagtcttcccacctcagcctctcctgagtagctgggactacaagtgcacatcactgcccccggctaatttttttttaaagaggtagggtcttgctatgttgcccaagctggttttgaactcttgggctccagcaatcctcccacctcagcctcccagagtggtgggattacatgtatgaaccatcacacccagccaagagcctcttaagaggtctgagctgagtcttcaaaaactaacaggagttttctaggccaaaggagaaaagaaacaaatacagagatgtgaagcagcagagtatagaggacagtgatggctgaagaggtggacagtgaccaagtcatagggaacatcctatgctcaataagtataggacgttgtgtgtttgtatgtgtatggacgcaggcacataagagactgggagggagaaaaaaatgaatgaattaatataaatgtgcttatcaggaaacactcttccatttgtagattgtgtgtatattatggctcaatgcaaccctagctgcaccaaagggaattcccactcctaaccctgtagctcatttttaaatagaatttgttgactaatatggaaaagccttggagttctgatagaaacacataatattgttttatatatcaaacttttaaataatgcagatcttggggtattataaaactttctgaagatatttagttttatcagatttgaaatttaaaatcgtcttttggaggtaatatttgggtttggttcatctggaaaagttattctaaaattgtgcaagataaaaatatatatcatttgcttttttttttttttttttttttttaaatatggagtctcgctctgtcacctaggctggagtacagtggcacgatttgggatcattgcaaccttcgcctcctgggttcaagcaattcttctgcttaagcctccccaatagctaggattgcaggtgctagccaccatgcccagctaatttttgtatttttagtggagacaggatttcactatgttggccaggctggtcttgaacttctgacctcaagtgacccgcccgcctcagccccccaaagtgctgggattataggtgtgagccaccatacctggcctcatttgcttttaattccatgttgaattttttgctttgagatgaacattttttcatcaaacattttgtttttttgttttgagatgcagtttcgcacttgttgcccaggctggagtgcaatggcatgatctcagctcaccgctatctctgcctcccgggtccaagagattctcttgcctcagcctcctgagtatctgggattataggcatgcgccaccatgcctggctaattttgtatttttaatagagacggggtttctccatgttggtcaggctggtctcgaactcctgacttcagttgatctgcccacctcggcctcccagagtgctgagattacatcaatctgataactgcactgtgaagcaaattacactcttgctaacttataaaatcctccttaggtttgggttcattattaagggtatttagaaactttcttagtacaggcttaattaaatatctttctgtaattggactttgttgcataatgggaggtgttttgattccttgaatggtaaaaatccgattaaatacagtggttctcaggtgtggatactgcatttttttcttattcataagtaaccctgtgtctttcttatgtttttggtaggaatctgtagtaaaatataccttgcaagctgttacatacacaaaactgaaagaaaatttgactaaacaatacctgctgttgccacatgttatgtatgaaggggatttttctgttttattcaatcgtttaaaggctttaattgtttatgacccactaaattgaattcagaaatctctctatccacactttggaaaatatgattatatcctattgagtccttaaaagtaaatgttgatgcaagaaaatcacagacccctttacataaattacagataagaaaaaacaataaggaagccaagcataacttcttatgtcttccatatcatacacacatgagcaaactaagaaattacctagaccaatattgtttactgtgataacctaaacaaaagcctagtcactactagcagaacataagagcttttttttttttggagacagagtgtggctctgccacccaggctggagtgcagtggcttgatctctgctcactgcaacctccgcctcccaggttcaaacaattctgcctcgtccttttgagtaactgggactacaggcacacaccaccatgcctggctaatttttgtatctttagtagagatggggctttcaccatgttggccaagctggtcttgaactcctgacctcaggtgatccacctgcctcggcctcccaaagtgttgggattacaggtgtgagccaccacgcctggcctctactgggggttttaaagttacacagttctcagttcaagttttagattcgctacttaccagtgagctaagtaacttctctaagccttggttttctcatctgaaaactgagagacataatagtattacctcattggaataccatgaggttatttgagagcacttgtaaagtatttagcacagtgaaagctgtaactaattgtctccttttctaataagggaggaactaatcagactatttgaagaaggtctaaaggaagaagtgggatgaatagataaggcaccctggagacgcaggaggagttgggaggacaaaaggagaaaatgaactagttgggttaccctggagaattactttgcttgattagggaatcactatcaggataccagtcctacaggaaacttgaagccttctgccctgaagatggtgctgaagatcttaggtttgagctcagaagggtgggaaggcaatgtagaaccaatagaagggagtatatataggccaaaccttctgatgagtagatgagatcaaattactgcagcaggaatcttgcagtaatgaactggcagggcccacattgaccaaggaaaaaaattgtaaaggacattagagcaatgcaagtaaaaagagatgacaagtgtctggacttagacacttgacagtgggagtgtaaatagagattagtctacacatgttggttagttctcacaaagggaatatacattaatattatttaggaagaagcagcaactgatgttatgagaagagtaaatgattgagataagttgaaaattaagcttccagccatacaaaagtggagattgctatagtgtcaaaagtctttgggaatgggaaagttaggttatcaagaatagaatggaggaaaaatgacccattctggctttaccatgttccacatctagaaattcaaggtcacagtatcacggtaagagaattgattgtccagtggttagaacactgccctttaacaaaagccatttaatcagactaacacatggctatactatattggcactggatagatattcttcactgacagaaaccaaaatagcagcactgtgccagcaaaggaagggagctctttcttggagctacagtttctctttctataaatgggagacgagggtaagcattctgtaattacttcctccttatcggattggcacagatttcatcaagcatgccaaattaaaaaacaaaattcagagcaattccatatgtcagagatggagaaaacaataaaatcaatactgttatttctaaatctttactagatatacatttcaaatattgattagaataaacataacaattaagattcatccatattttttaaaaatgttatctgaatattttttattctcattgttacatagcaagtgcacattttggcactatatcaatttcagttcagttcaagcatccaaccaatcatttggttgatcagttctaatgagttaaggttcttatagttgcaagtaataaaatcttgtgctatcttaaataagaaagggattttatcacgtggacagcaaagtgtgttcctttaaatgcaagggcagttcatctaggcaacagagctggtactggactgatgctggcaaccattctccctatctcttgccatctaattaaaacttctctcttgacatctactttatttctctgtctccaacttcttggcttctttatttctatggcagaatattgctgctacacagcatccagatttatagttctaccatctgaatcacaactccatatttctttggtgagaatctgaccgagtaatgttaggtgagttttgtgatagtatagagcagagcccctgagcacacactcaaactaaactgcctgggtccaatcctacctcacttgcaattagctctatgactttgggcagattacttaatctcaaacctcatttttctcatctgtaaaattggagtctgcaagagaaagtagtccggactgaaatcggccagaagtccctctcatgttatatctaaagtaaacctatctttaactgccaagctgtgtttcgtgtttctttcctctttctttaactcttacagaatcatgttagtagtacctgtaagattaaatcaaaattaagtttaaatttaaattaaatcagtaatatatgtaaagcacttaagaaaattaattgtcaatatatgtaaagcactggatacctagcacatagaaagtggcatgtgtatgttagttattattccaaattgattcttttattatttatgaatgaatgagacaaggtctgtcgctcactgctgcctcaacctcctaggatcaggtgatcctctctccttagccttccaagtagctaggtgtacaggtgcatgtcaccgtgcctggctaattttttatttttgtagagatggggtttcactgtgttgaccaggctaatctggaactcctgagctcaagtgatcctcccccctcggcctcccaaagtgctgagattacaagcgtgagctaccacacctggcctggttaacagaaatttaaaatgatgattaagaccaggcgtagttgctcacgcctgtaatcccagcactttgggaggctgaggcgagtggatcacgaggtcaggagatcgagaccatcttggctaacacagtgaaaccccgtctccactaaaaatacaaaaaattagccgggcatggtggcgggcgcctgtagtcccagctactcgggaggctgaggcaggagaatggcgtgaacctgggaggcggagcttgcagtgagccgagatcgcaccactgcactccagcctgggcgacagagcaggactccatctcaaaaaaaataaaaacaaaacgatgattaaattattagagaaaccaattttttttttttttttttgagacagagttttgctcttgttgcccacgctggagtacaatggcatgacctcagctcactgcaacctgtgcctcccaggttcaagcagttctcctacctcagcctatgggtagctgggattacaggcatgcaccaccacgcctgggtaattttgaaattttagtagagagagggtttctccctgttggtcaggctggtctcgacctcccgatcttaggtggtcttcccgccttgacctcccaaagtgctcagattacaggcgtaagccaccgcgcctggcgagaaaccaatattacatcaaaactcaccacagtgcgcaagctgaacgtgtaatcaaattgtagtactcaaactcattgcaaggacttcaagcttatttacaaacaggatttacagcaaacaaaacagtgtagccctgtaattgtaatgcccacaataggatttctggcaggctgaaatacagaagccctcttatccgacacagtcagggctgtagttggtttatagaaaaagttggttcaggagaagaaggataaaaattgctacatactaacttaaacatttgtttttacttaaaacttccattatcaattttgctttaaggcctttaatgctctttgtttgcttcggaattctgaaatccatatgccttctagtttcagtttccttaagaggggcagtaaattaataaatgtgtcaagcagtctaagggcaaatttgatagagattttcataacttttttctttacattttttatggcagcattgccaccatttaattcttttttttttctttttttttgagacagggtctcattctgtctggcgtgcaatggcgcaatctcggcttactgtaaccttcgccttccaggttcaagcaatcctcttgcctcagcctcctgattagctgggatttcaggcatgtgccaccacgcccagctaatttttgtatttttagtagagatgggatttcaccattggccaagctggtttcaaactcctgacctcaagtgatctgcccaccttggcctcccaaagtgctgggattataggcgcgagccaccacgcctggcctcacgctttggcttttgtccatgttccattgaccaaacaaatcaaaaggccacttccaacatcctggagaagaaaagggtactccacaataggagttgtgggaggggaaagtgagtatttgctgaacaatagtctaccacatatataattgacctaactgacccttcatatgatcaccatggttaggttagctgtgtaaaatatataagcactgtgtttctcaatagtacacttatataatattcacaaaaattgcacatgcacagattcatcatcaaaaaatgacatatactcattgaaaaatgagataaaattgaaaattcagacttaccagtcttttaccattattcattttactggaaactttaaagtgaattggcactcttttttccccatcccttccaaaggtaattaagaaacagaaatctcttgccaatgtttctagggtatgccaacattgttatctcaacctgatccatatttatagcccagggatttgcaaaaacttggggggggggtcatggattcctttggcagtgtagttaagtccatggaccccttatcagaaaaaaatgtttttaaatgtgtaacataaaatagataagactacaaaggaaatcaattgtatttaaatacaattactaaaataggccaggtgcggaggctcacactgtaatcccagcactttggaaggctgaggtgggctgatcacttgaagtcaggggttcaagaccagcctggccaacatagcaaaacccaatctctaccaaaaaaatacaaaaattagctgggtgtggtggcatgcgcctgtaattccagctactcgggaggctgaggcaagagaattgcttgaacctgggaggcagaggttgcagtgagctgagatcacgccactgcactccagcctgggggacagagcgagacttcatatcaaaagaaaaaaaaaatacgattacaaaaatagacagaaatcagatttatgatatggtaataagtacttctttattaaacacattaaatagcaagaaatggtagtgaggctactataaatgcaaaataattttgagatatatgtaatacatataatgtgaatgaaaatatctgtggtatctataggtggcaaaatcacaaataacacagtggattattggctacatttataatggaaggaattgataaatttcagttagaggttcaggaaaatagtttttttccatctaagttcaattcaatgaactccctccacatacccctaatataacctttatctgatactgtctgagacacaaagatttttacaagtcttttctttccttacagtgggctaggagaaatcttgatcatgccttccactttctctcttcctcttaatggtatagaaaattacttgtgtgattatttaatgaatctctcattaacctataacttccctatgtcagctttttttattttggaaacagaatctcactgtgtcgcccaggctggagttcaagtgattctcatgcctcagcctcccaagtagctgggattacaggtgtgcaccaccacgcccagctaatttttgtatttttttagtagagatgaggtttccccatgttggccagactggtctcaaactcctgacctcaagtgatccacccaccttgcctcccaaagtgctgggattacagacgtgagccaccatgcccggccagctatttctgtttttaccattgtatttccagcccagcattgtgcctgggggaattatacacactctgtacatatttaatgaatatattgggggaagatgaaatcccacatagttacaatcataatcttcaatatgtttgtgacaattaaatacattcatgtgtgtgtgtatgcataagatatggaatttatttttaaatctttttatccttagacccatatactaagttcttatgattgtggaatcaggttagagtctagctgagtacttaattagctcttttgttttctttttttgaatttttgttttattttttaattttaattttaactttttttttttttgagatggagtctcgctctgtcacccaggctggagggcagtagcatgatctcggctcacttcaacctccgcctccggggttcaagccattcttctgcctcagcctcctgggtagctgggactacagatgcctgccaccacaccaggctaatttttgtatgtttagtagagacagggtttcaccatattgggcaggctggtctcgaactgttgaccttgtggtccgcccgcctcagcctcccaaagtgctgggattacaggcgtgagccaccgcgtccggccctgttttatttttatttgagacaggttctctctctgttacccagtctggagtgcagtggcgtgataatggctcactgcagcctcgaactcctgggctcaaatgatcctcctgcttcaacctctcaagtagttgggattataggtgcatgtcaccatacctggctaatttttttgtttgtttttttttgtagagatgggggtgtctcacattgttgcttaggttggtcttgaacttctggcttcaagcaatcctcccacctcagcctctcatagtgctggggttgcaggcatgaaccactgtgaccagcctttctattcttttttgagatagtgtctcttactctgtcacccaggctggagtacagtggtgcaatcacggctcactgcggcctcaaatgnnnnnnnnnnnnnnnnnnnnnnnnnnnnnnnnnnnnnnnnnnnnnnnnnnnnnnnnnnnnnnnnnnnnnnnnnnnnnnnnnnnnnnnnnnnnnnnnnnnnnnnnnnnnnnnnnnnnnnnnnnnnnnnnnnnnnnnnnnnnnnnnnnnnnnnnnnnnnnnnnnnnnnnnnnnnnnnnnnnnnnnnnnnnnnnnnnnnnnnnnnnnntgagccccactcccagccttaattagctcttaactgtttcaaaaatcaaacaaacgaacaaaaaaatgcagtgattatttctgttatacttttatttagtggttcatttaacatgtatacctcctacgtgcatagcactgtgttaagctttgagacatcgtcaaagagataacagtccagtttgggagacagccatgtaaacagccgtgtatgagtcagtgatgtgagcactgttagaaatgtgtaggtgctgtttgtcctatatgctcctgtcacaccttgcaccctgtgaactaactgaaatgggatattctatctgcttttctgagttgtacactgaagttcattttccttgtgggttgttttatttcttctctctctccctaccatagtacctggcacatagtgtcagcagccagtaaggttctaattattgaataaaggaatggtggagataattagagatattttcataaagatgtagacactttttaaagtacaggttttgatttttaagctcttacaattttactttataaataatacatgcacacagtatcagaatttcaacaaatatgaaatgatatccagtgaagttacctacccattcctgttttcccagcagttttagtagttttttttagaagtatccttctataaatatttttatacatgcaaacaaatttatatgtgttctcttttttcagagctcttggtggcccttttatgttctgtactttgcttttctcacttaacagtatgtgttgatttttctatgtcagttcatgaagggtgtccttgttcatttgaaagctacatagtatttcactgtatagatttctataatatgtgtaaccaactccctcccactctgtgagtgtgtaggttgttttcaatattttgctcctacaatactgcagtgagtaatcttatataacatttcacaaaagtgtgtgagtatatctgtagattaaattcctaggagtggaactgctgggttgaaggatacattcatttgtaattttgatagataaggccaaattgttttccttaaaggttatattagttaatataactaccagcagtgtatatctgtgcctatttaaaggtggaaacttttgaacaggaatctaagaaaaaataggaatttatcagattgtcaggggacgggaaagatgttccaggcagaaggaatagcactttgagaggcacgggatagaaagatggcacaagaggatttttaacttattccatctggctaaaatgtagggggtaggccaggaaatagagagtgggagttgatcatgataggttgtgtatgtaatgctgagtaactgatattttaaattctataaatgaaggttttgagtagggaaatgatataataaggttgattaatgtattttattaaaagaatagctatttgtgtgtatttatttaaattgaagtttgccaaaaaggtgtagtccctaaagatttttcttgctttttttgtttgtttatttggagacagggtcttactctgttgcccaggctcgtgtgcagtggtgatcagatcatagctcactgcagccttgaaattccaggtttgatcctcccacctcaccctcccaagtagctggtactacaggcacatgccaccatgcctggctaatttttaaaacattttttgtagagatagggtctcgctatgttgctcaggctggtcttgaacgcctggcttcaagcaatcctccagcctcagcctcccaaagtgctgggattataggtgtgagccaccacactcagccttttcttggatttaaatgaggttttctttttactaaggattcaaataatatgttgactatagaaaattttgaaaacacatagaaataaaaactgaaacacagaaagaaaatacagaagttactcataagtttactactctgaggtaatctccctatccaaataattcctgttgtctataaaacaataaaagaaaatcaatatatgtattaggtgggttagaaaatacaaagtgggccacagtccgggtgggcatggtggccgcagcggtagctggagcctctgcgactacacctccaaccggcctggagcccgtggcttccctggctcctgcaagcatctcgcgtggtggctctggccagctccagcactcgggttgggccggatgaccagaggcctgtagctaccagctgccctctcccgcctgggctcagccgccacccgtgagcgaactcagcccgggacacagcacacttatcaagtgggtcccatttttagccacttgctatttcagccattgctgaaaagtctagtgggaaggaaccaactggagagtcagagggagaaattagtttctatttccagctccaccactataatccctggttgaagaaatatgaatatcaacacgaaattgttcatcagcgttatttgtgccagctttttcaccttccagcttcttttctactttgtaagttactggttttcacaaaagtttctccaagtttcaatagtcttagctttgaaaagaagattgaatggaactcaagggtggtatttacatgccattctttggtggttggtgttcttggcctgtacattttcttatttgatgaggctgctaaagctgatccactttgggatggtccatcacttgcaaacgtgaatattgctattgcttcaggctacctcatttctttgttttctttcttttttttttttttgtgatggagttttgctcttgtcgcccaggctggagtgcaatggcatgatcttgactcactgcaacctccgcctcccaggttcaagcgattctcctgcctcaacctctcgagtagctgggattacaggcgcccgccacctcacccagctaatttttttttttttttttttttttttgtatttttagtagagacagggtttcaccatattgtcctggccccgaactcttgacctcatgtggtctgccagcctcagcctcccaaagtgctggggttacaggcatgagccaccacgcccagccaggctacctcatttctgatttgtccattatcattttgtattggaaagtgattggtgacaaattttttataatacatcattgtgcggccctgtgtgcatactgctttatactgatattagtgaataagaagtttaatttggcataatttcttcaagaatcagatatatcgaaacatctctccagaccacccatttggaatcacgatataaataattataaatgttttaaaaactgcttcagttctcttggccactgaaatcacaggcttagcctggctgtgcgtggattggcaagctgaatgtttaattatgtggggtgactattattttctctttggacttttatgcctttaaaataaaataaaataaaatagaaaatacaaagtggtttccaaagacaatcacttgttaagagattcttgtgattcctcctaggaagaaagaaaaaaacaaaagtgatgcatatacctgcataaattacagcataattgttaatgtagagctgtacaacaaatatcttctctttaaatatacgaatgtcttttaaagacagaaagaactgttttattttctttgagggcctcactacaagccttttagatagatccagataacatgttctactttccctctttgcaacacttcgctagcaggtacttcctaatcaggatcttgacaactatcagccacatagaatacttggaaggaggttaacttttcatactcaaaagctctcttctggaagaatcctaatattattaatagcaagtcttccacttgtagggcctgttggaacagtttgtgacaaatccttcccagactgttctttgagtatacaaattaatatctccaagtcactgatactctgagcacatgcatcctgctgctagggaagtgcattaaggtaccttcaaaaccttttttcctctgtaattacatcctaaaaattacactggagggtgggctggggtggagggaaggtcccaggtgcatttactgagctatctgtcaaagtccaccaagctagtagattgtgaccacaattttgataatttcggattccatatctgcaaggcagtgttaaaactacacaatacctgataaatgctagaatgaggataattcctctaaatagttaacatttaaccagaagctctacagtgctctccaacctaacagtcacacattaatttattccttcatgtaaaagaatcatttttattgctgctgcctgaaaggtacaaattgcttgggtgtaggctgctcagcttccttcttactaaagagacaggaaatatatcttccatttaaagtgttaatggcatctataaatgtgtagtccaatttgttattgacttgaactcttcaaagatttgagaaacaaggtttaactttagcactcaagattgttacacaagaattaaatgttttcaatgactaccttttgtagtgttgggaagggtgcaaaaaggaaagagaaggctggaaaataaatatattttatctaagagggcatgactgagttggctaagctttcaatttcatttttctcttaggaaagactttcacctattatgttacaatgtgtgctcacatttcctgattatggatcgaaatggagcttggagcactacatttggtgcaggagaggactgtcgagactagaaccaagttgggttttttgttgtttttgtttgtttgttttgttttgttttgttttgtgtgtgtgtttttgagacagttgctctgtcgccctggctgtagtgcagtgacacgatcttgactcactgcaacctccgcctcccaggttcaagccattctcctgcctcagcctcccgagtagctgagattacaggtgctcaccaccatgcccagataatttttgtatttttagtagagacgagatttcaccatgttggccacgctggtctcaaactcctgacctcaagtgatctgcccacctcggcctcttaaagtgctgggattacaggcgtgagccaccgtgcctggccccaagttgtttgttaacagacacctgccaaaagacgaggacttcctctgaacccttatcaggtcaaaacatggtagatattctactaaaattggtcaaataagtaaatgaaataaatgaatgaaaattattcattctttcaagtttgtttggagaaaataatggaaaccattcaacttgagaataaagtgtttaaaatatttataggctgtacaaatttgaagtgctattagtatcccactattaagtgccacttgttacattcccctagataatctagaaggggcaaacaaataaaaataatttaagacaaaagtaataattccacccagggtgaaatggcattcagcctattctaattctttttttttttttttgcttttggaagtttttttttattattatactttaagttctagggtacatgtgcacaacgtgcaggtttgttacatatgtatacatgtgccatgttgatgtgctgcaaccattaacttgtcgtttacattaggtatatctcctaatgctatccctccccactccccccaccccatgacgggccccagtatgtgatgttccccttcctgggtccaagtgttctcattgttcagttcccacctatgagtgagaacatgcggtgtttggttttttgtccttgtgatagtttgctgagaatgatggtttccagcttcatccatgtccctataaaggacatgaactcatccttttttgtggctgcatagtattccatggtatatatgtgccacattttcttaatccagtctttcattgctggacatttgggttggttccaggtctttgctattgtgaatagtgccacagtaaacatatgtgtgcatgtgtcttgatagcagcataatttctaatcctttgggtatatacccagtaatgggatgtctgggtcaaatggtatttctagttctagatccttgaggaatcgcctcattgtcttccacagtgggtgaactagtttccagtcccaccaacaatgtaaaagtgttcctatttctccacatcctctctagcacctgttgtttcctgactttttaatgatcgccattctaactggtgtgagatggtatctcattgtggttttggtttgcatttctctgatggccagtgatgatgagcattttttcatgtgtctgttggctgcataaatgtcttcttttgagaagtgtctgttcatatccttcacccactttttgatggggttgtttttttcttgtaaatttgtttgagttctttgtagattctggatattagtcctttgtcagatgagtagattgtaaaaattttctcccattctgtgggttgcctattcactctgatgatagtttcttctgctgtgcagaagctctttagtttaattagatcccatttgtcaattttggcttttgttgccattgcttttggtgttttagacatgaagtcgttgcccatgcctatgtcctgaatggtattgcctaggttttcttctagggtttttatggttttatgtctaacatttaagtctttaatccatcttgaattaatttttgtataaggtataaggaagggatccagttttagctttctatgtatggctagccagttttcccagcaccacttattaaatagggaatcctttccccatttcttgtttttgtcaggtttgtcaaagatcagatggttgtagatgtgtggtattatttctgagggctctgttctgttccattggtctatatctctgttttggtaccagtaccgtgctgttttggttactgtagccttgtagtatagtttgaagtcaggtagcatgatgcctccagctttgttcttttggcttaggattgacttggcgatgcaagctcttttttggttctgtatgaactttaaaatagttttttccaattctgtgaagaaagtcattggtagcttgatggggatggcattgaatctgtaaattaccttgggcagtatggccattttcatgatattgattcttcctataccatgagcatggaatgttcttccatttgtttgtgtcctcttttnnnnnnnnnnnnnnnnnnnnnnnnnnnnnnnnnnnnnnnnnnnnnnnnnnnnnnnnnnnnnnnnnnnnnnnnnnnnnnnnnnnnnnnnnnnnnnnnnnnnnnnnnnnnnnnnnnnnnnnnnnnnnnnnnnnnnnnnnnnnnnnnnnnnnnnnnnnnnnnnnnnnnnnnnnnnnnnnnnnnnnnnnnnnnnnnnnnnnnnnnnnnnnnnnnnnnnnnnnnnnnnnnnnnnnnnnnnnnnnnnnnnnnnnnnnnnnnnnnnnnnnnnnnnnnnnnnnnnnnnnnnnnnnnnnnnnnnnnnnnnnnnnnnnnnnnnnnnnnnnnnnnnnnnnnnnnnnnnnnnnnnnnnnnnnnnnnnnnnnnnnnnnnnnnnnnnnnnnnnnnnnnnnnnnnnnnnnnnnnnnnnnnnnnnnnnnnnnnnnnnnnnnnnnnnnnnnnnnnnnnnnnnnnnnnnnnnnnnnnnnnnnnnnnnnnnnnnnnnnnnnnnnnnnnnnnnattttgggctaagacgagcctactctaattctttaatctatgtagtagttgcttatatattaaacgtgtgaaaatcgtatgaaatcattgttaattcatactgaaatattcacttacctctgatctatttaagccaagctaataggtttcagcctgtttctgacctcaggagcctggacccacctatgctaagataaaagccatgatgactgtggcaacagtgttgctgacattgtactgaccacattgctgtaagtgtctccatggcacatctgcttctgtagattcagtcttactctgcttttagagactttcccatataacactaaaatgtacttgcctgttagtatgtttgatattcttcaaagggagagaattggcctggcatggtggctcacacctgtaatcccagcactttgggaggccgaggcaggcagatcacctgaggtaagaagtttgagaccagcctggacaacatagtgaaaccctgtctctagtaaaaattagccagtttggttgcaggtgcctgtaatcccagctactcgggaggctgaggcaggagaatctcgaacccgggaagttgaggttgccgtgagctgagatcacatcactggactccagcctggatgacagagtgagactccatctcaaaaaaaaaaaaaaaaaagaaaagggagataattaatttcatttcttcattctcactgacttcaatgaggagatttagaataggaaaagaaaattagtatacgaacaagttgagacgaaacagaactgacataagaagaacataaaaagcagagtccataaatcttgcagtatggtagcctaggtttcatcttaatagcactaatacagacacaaaataaaatgatagtttgatgaggtaagtacagtttttcaggcctgtcttacaggtggtaaatctgaagcacagattaagttacttgttcaaggtcacagtgctggaaaatggtaaagtcaggatttgagcacaggctttctggctctagggctgtgctcttaataattattccaaatgcatggcgtttgtgctttgtactcccttattagatgttacatacaatattcttttgtttatatatccctttgatgatcagaatctgaacttttctaaactgtaacagtttcttaggaaggtgataagttagacgacaaatctataattagagtttcttttacttttggagcatggattttgaaagtgaatgattaacgatgattgacattcttatcagatttttatttactttcttttaactatttggataataaagtaatgatgcttgcctgaataacagcagttctctgttgggctttgtgctttatacatggaaagagggccttggtctattgcaaggatactaaacagtgactgtatagcatgttaacaatgttttaataaatatttttagcaattatgagctaacttaagcctttttaaaatggaatatttattatttactttgtgcctagtaatgtgttagtgctaagactaaaagagcaaagcaaatgccattcctgccttcagagtgcttacagtctagcaggcaagattgatattaaacacatattcaaaaaaagggtatgagttttttaaagagaggtagtgctaaatcctctgggaacatcctctgatctcatctaaatttgaaaccctaggttctctgggaatctatagcaagaactaatccaagttaggggtcagagaagatgtgaagaatgagtaggatttagtcagctgaagagaatgaggctatggggaagcgtgttctaggaagaggagaaatatattcagcctcagagatgtgcaaaaaagaacttaaactgcagagactttcgggagaaaacaaacaaacaaaaaaaccgagcagacaaaaaaaatgcttaaagaaattaaataaatggatcgtagagtgcaaggtgaggagagctcaggagctcaggaggggcttaaaattaggctggagaagacgttaggaactaaattataaagaaccctgctatttatgataaggaattgggctttatgcaaagggcagtggaaaactgttcaaaagattttaagcagggcagtcattaattttgtggctctatcaaaaacattaggccaattatttaaacttgggcaattcatttgatcttcctagttctaaattttctcatttttagagtaggggacttggattagccctttcagatcaaagatccctaatgtgagtttatgcaccctgagaggatcatgtctagaaagaagtaacagagtatcctcatccatcctgctctctgttcttttccttttcctttcagatttcaatatcaattttctcatgaggcgtattttagtcagtattttggagaaggcattctaatgactcctatgtctatttttttgaaataaaattcattttgtcattataaaggtaatatagaaaattttttaagcatagaaaatgaagaagaaagcaatcataatcatggatgtcatgctactgaaacccttgggatataactagaatggaagtcaggctggtaaagcaaatcccatgagaggagagagtgattactgggagaggggaatgtttgggggggtagaataatcttcagattcctgaaggactatagtgcagaagttggaatagaagacagaattatggttaatgagtagaagctactagagatacagattttaactcaatttgggaaaaacaaaactagcaattgcaactgtccaccagaaaattagtgaattcctctgaatgcccataggtattctagtaaattactacatgtacttcaaggttgccagtagaaggtgttcaggttcttggcatctcgaacaaagaattagacaaaatgcacacacaacgtgaggaaaccaaagcacggatttactgaaaacaaaagtacactccacagtgtgggagcgggcctgatcataagagccccgcttacagaattttctggagtttcaatactgtagaggtttcccattggttacttggcgtatattctatgtaaatgaagagaatgaagtcacagagtcatttactcagactgcgccctattttaaatggagaggatgttgcttggtgtgtgtggtctatgtaaatggagaggatgaatgtgaagttacaaagtgtaaatgttgtggagaggatgaagtggagttgcaaagccattcacattcctgtcattactgaagtgctttcacttgatataattttaggacattagtgtggatcgggcttgtgttccctgcctccaggccctattctcctgcctcagcctcctgagtagctgggattacaggtgtgagccactacacccagctaatttttctatttttagtagagacagggtttcaccatgttggccaggctagtcttgtactccttgcctcaagtgatccacctgcattggcctcccaaagtgctggggttacaggtgtgagccactgtgcccaggctgaatttgaatgttgacctgtcttgctaggttgacgaagttctcctggatgatatcctgaaggatgttttccaacctggttattttctccccatctctttcaggtaccccagtcagtcataggtttgttctctttacataatcccatatttctcggaggttttgttcattcctttttattcttttttctctattcttgtttgcctgtcttatttccgaaagatagtcttcaagctctgaaattctttcccctctttggtctattctgctatttatacttgtgattgcattgtgaagttctcatgttgtgttttacagctccattagttagttatgttcctctctaacctggctattctggctatcagctcctgtattgttttatcatgattcttagctttgttgcattgggttatgtattaattcgttctcacactgctaataaagacatactcgagactagagaattgataaaggaaagaagtttaattgactcacagttcagaatggctggggaggcctcaggaaacttacaataatggcagaaggggaagcagacacgttcttcttcacatggtggtaggagagagaatgagtgcccggtaaagggagaagccccccttataaaaccatcagatctcatgagaactgtctgtcatgagaacaggatgagggaaactacccccatgattcagttatctccacctgagccctcccatgacacctggggattatgagaactacaattcaagatgagatttgggtggggacacagccaaaccatatcaggttacaacatgctcctttagcttagtgaagttcattaccacccaccttctgaagcctacttctgtcatttcagccatctcagcctcaacctagttctgtgttcttgctggagaagtgttaacggtcatttggaagagaacagactctctggcttttttgaggttttagcatttttgcattgatcgtttctcatctttgtgggcttatctacctttgatttttgaggttgctgacctttgagtgaggtttttgtggggtcttttttgttgatattgttgtagttttctgtttgtttttctttttaacaatcaggccactctatctatcgtaggactgctgtggtttgctgggggtccaatccagaccccagttgcctcagtttttcctgtacctggaggtatcaccagtgtaggctgagaaaaagcaaaggtggcagctagctccttccactggaagctccatcctagggggatactgaccttttgccagcccacacacacctgtaggaggtggctgaagacccacattgggaattgtcacccagtcaggaggaacgggatgagggacccacccaaagaagcagtctggctgctttttggtagagcaggtatgctgtgttggaggaggtcccttccttgtttggaccacctatattctccatagctggcagactagagcagctgacttgactgaaccatagaggtggtggctgcctctcccccccaggaactcagagttgtctctgatggactctaatccactgccattggctggctgggattccacgccagtcggtcttaacttgtgaggtgctgtggaagtggggcccacagaacgtcgctgcttgactccctggattcagctcccttcctagggatatatacagatggatttcccacctttctgggaatcctggggctggtgtatttaaaactcctgggtctctgcatgtacctaagtggctactctgccgtgactccacatagctctgtgtatcagacccaaggccctgttggcatggtctcatgaggggactctcctgataggtgagttgcaaagatctgtgggagaagtgtggtttcccaggtggggttgcacaatcactgtttcccttggctgggggtggagtttcttttggctctatgccactcctgggtgggctgtcactgccctgcctgccccacactacttttctttgttctctctgggtcaggtggtttgcctagtcagtcccagtgtaaccacctggatatttcggtgctgaattcactcttcctttttcattcgtctccatgagtgtaatggaccacagctgtttctaatcggccatcttggattgatctctgaagctaatctaaaaggtgaggaaactaaggttatgggaagttaaggaaactggctaagacatcaggactcagtgacaaagctgggatttatatttcaaattcagcagctgtaattttttttccattgtgtgcatcttctaaaataaataatcctgtatattagagatatagaggcaacagaccaattcttgtttcctggagagtttgggaaacttcctagaattccaagacacacaagtaccataagtgtaaatatccttccaaagccatttgccttcacctgggtgcctaaagcttcaatgcccagatatgccatagaaatacagatcattctgtagctggagttgtcccattacaactctgggtttatgaaatgtgcatctggtgaaatacatgagcctttgtcttcagattatgagtggaatgtgataatataaagagaaacttcttttaatacagataatgcatttttctttatcacagaccttccacaaattctgctgttctatttgggtatttgacaatggactttgtaatgtatgacagtgcatatgggaaaataaaatgttcatgtggggtatggggaaagagaattctcagcaaatgaattggaattataatataaagcagtatagcattaggatttgaatataaaatcatataaagccatataacactggatataggtggttaagaagtggataaaaaaatttcatggctgagtgcggtagctaacgcctgtaatcccagcactttgggaggctgaggcgggtggatcacctgaggtcgggaatttgagaccagcctgaccaacatggagaaacatcatccctactaaaaatacaaaattagctggacatggtagcgcatgcttgtaatcccagctacttgggaggctgaggcaggagaatcgcttgaagccgtgaggtggaggttttggtgagctgagatcgcgccattgcactccagcctgggcaacaagagcgaaactctgtctcaaaagaaaaaaaaaaaaaaaaaattcctagggagatttctgattttaaaatggtgacatggaagcaagctgcctccactctcccctccccccacagaaaaccaaaaacaaatatatagcgccaagatttttgctagcaacaactctgagcagtcagtaggagaactgaacttccatatccaaggttctgctctctcccccattctgcctggcaataagcttgaggaaaatctttccccaacttagagtttctacactagaaaaactgagattgaggccaggtgtggtggctcatgcctataatccctgtactttggtggctaaggtgagaggatcacttgagcctgggggttcaaggttccagtgaactatggttgtaccactgcactccagcctgggtgactgaacaagactatgtctctaaaacaaaaagagagattgagaccatcaaccatcttttcgcaccatactgggttacctggcaggagacctgttcttgccttaacccacaggaagcatcatgactgcctaaagggaggaatattcccccaaggacaggcagacaaaggggagaaatgggactatcatccctagctctgaaaactctgctttgtaactaggccaaaggagatgccacataaaagtggctgttcagtagctctattctataggaggtacatttctttctttctttttttcttttctttttttttagggaggaggggtgtcttcctctgtcacccaggctggaatgcagtggcgtgaacacagctcactgcagcctcaactccctgggttcaagcagtcctcctacctcagcctcctgagtattgggactacaggtgggtgccaccatgcccagctaatttttaaaatttgtttgtagagacgggggtctcaccatgttgccaaggctggtctcaaactcctgggcacaaggtatcctcctacctcagcctctcaacttgctgggatgacaggcatgagaagagagtggtatatttcataggttccttggacaggaacctctagccagccttctcacactgctgggataatctctttgggaactccctagtttgggacaggcagcactccaatcatgcactagcgtcaaggtgaacctgggctttaaggtgccacaagagccaaaaaggaggaagtgacctagtagtaaagatttgctaaggaactatatctaataaaaaacaaaacaagccagacagaaaatactgaaataaataactaattcttcaatgcaaatactagaataaataactaatccttcagtgcaaaaaccatgacctttccaaagagacagagcaacaattcagtcactagccttaagtgatgatttgtaagatctgtgacctagcattcaaaatggcaattttaaggaaactcagtgatcaccatcataacaaagaagagcaattcagaaatttatcagagaagtttagcaaagattgaaataacaaaaaattaaatggaaattttagaactaaagaatacctttcctgaacagaagacttcattaaaggctctcaacagtagaatggactaaacagaggaaaaaaaaaatcagtgagttcaaagactgtctgaaaatacacagagaagtctgggtgtggtggctcatgcctgtaatcccagcactttaggaggccaaggtgggtggatcacttgaggtcaggagttcgagaccagcgtggccaacgtgatgaaacctcatctctactaaaaataccaaaattagctggacatggtgccgggtgcctgaaatcccagctactcaggaggctgaggcaggagaatcacttgaccccacaaggtggaggttgtagtgagctgagatcgcgccactgtactctagcctgggtaacagagtgagactctgtctaaaaaaagaaaaagaaaaagaaaaaagaaaatacatggaggagaataaagaaaaagaatgaaaaggaataaagatagcctacaatatatagaaaattgcctcaaaagaccaaatcttagaattactggtgttcaagagggagctaagcagaacaaggaaggggaagaaagcttattcatttcctttgagacaggatctcactctatcacccaggtcggagtgcagtggccccatctccactcactgcaacctctgcctcccaggtttgagccattcttccacctcagcctcctaagtagctaggactgtaggcatgtgccaactcgcctggctaatttttttattttttggtagagacggggtttcaccatgttagccaggnnnnnnnnnnnnnnnnnnnnattcaacctcccaaagggctgggaatataggtgtgtccaccatgcctagcctagaaagcttattcaaaaaataataataggctgggtgcattggctcatgcctgtaatcccagcattttgggagaccaaggcaggcggatcacatgaggtcaggagttcgagactagcctgaccaacaaggtgaaaccccatctctactaaaaatacaaaaattagcggggtgtggtggcagatgcctataatcccagctactggggagggtgaggcaggaaaattgctggaatctgggaggcagaggttgcagtgagctgagatggcgccactgcactctagcctgggtgacagaatgagattccatctcaaaaaataaaaattaatataataataatagtaatagaaaactttccaggtacaagaaagcctgagatcactaaacagattcaacccaaataagatatcccaagggatatagtaaactctcaaagatcaaagataaggagaggatttgaaaagcagcaagagaaaagaagtaaataacatatgaaagatctccagtttggctggcaatagacttctgaatggaaaaccatataggccatgaggggatgaagtgacattttcaaagtgctcaaagaaaaaaaaaaacttgcattcaagaatactgtacccagaaaaactatccttcacatatgaaggagatataaaatctttaccagacaagtaaaaactgaatcattcaccaccaccgggcttatcttacaagaaataaagggagctttcccatttgaaagaagaaagcactaatgggttaaaaaaaaaagttttcaagatataaaacccacttgtaaaattaagtatacggataaacccaaaatactctgttactgtcatgtaacaatagctacagcagcctgttaagagatagataatgaaaaatatataaaatcagacaactgaaagtcaaaagggggaggcagagtagaattttgtcatgtttttttattttgcctgtttctgttcttttatttgtgatccaagataagttgtctttttaatttttttttaagattgggtctcatctgtcacccagactggactgcagtggcatgattatggttcactgcagccttgaccttctgggctcaggttatcctcccacctcagcctcccaagtagctgggactgcaggtgtgtgccaccacacctggctcatttttttgtattttttgtagagacatggttttgccatgttgcccaggctggtcacaaactcctggactcaaatgatccacccacctcggcctcccaaagtgctgggattacagacatgagccacaacacctggcccctatgttgtcatcttttaaaaataatttgttatatctataagatgcttttttttctcatgataagcacagtgcaaaaaacctataatagattcactaaaaataaaagcaacaaatttactacctattaggtaggaagaaagaaaggagtctcaaaacaaccacaagacaggcaacaagtggcattagtaaatccttacttatcaataataacactgagtataaatggtctcagttctccaattaaaagccatacagtggctgaatgggtaaagaaacaagacccagctatatgctgccttcaagaaacccatttcacctatcaagacacacatagacttaatgtgaaggggttgggaaaatatattctatgcaactggaaatgagcaggaatagctacaattatatcagataaaatagtacactaatcaaagaatgtaaaaagagacaaggtcactatataatgataaaagggtcaattaagcaagagaatataacaattgtatatttttgcactcagcaccagagttcccaagtatgtaaagcagatgttaaatctaaaaggagaggtaaactgcaatacagtaatagtaggggattttaagccccactctcagtaacagatgatccagacagaaaattagcaaagaaacagtagagttaaactacacactaaatctaatagacctacctgacatttatagtacatttcacccaactgctgcagaatacacattctcttcatcagcacatggaatattccccagaatagaccatatcttagaccacaaaacaaatctgaacatattttttaaaaaagaaatcatatcaagtatcttttccaaccacaatggaataaaactagaaatctgtaacatcaaaaatacacaaacacattaaataagtaagttaaacaacatattctttttttttttttttttttttttgagagggagtctcactttgttgcccaggctggagtacaatggtgcgatcttggctcactgcaacctctgcctcctgggttcaagcaattctcctgcctcagcctcctgagtggctgggattacaggtgcccaccactacacccggctaatttttgtattttttgtagagatggggtttcaccatgttggtcaggctggtctcaaactcccgaacctcaggtgatctgcccacctcggcctccccaagtgctgggattacagacgtcagccactgcgcctggccacgagatattcttgaacaaccaatgggtcaatgaaagtactaaaaaggggccgggcacagtggctcacacctgtaatcccagcactttgggaggccgaggcgggcagatcacgaggtcaggagatcgagaccatcctggctaacatggtgaaaccccatctctactaaaaatacaaaaaaaaccattaaccaggtatggtggtatgcgcctgtagtcccagctaattgggaggctgaggcaggagaatctcttaaacccaggaagcagaggttgcagtgagccaagatcgcgccactctactccaacctgggcaacagagtgagactctatctcaaaaaaaaaaaaaaaaagtactaaaaaggaaattttttaaaaggtttttttttgtttgtttttgagagaaggtcttactctgtcacccaggcttgagtgcagtgtcatgatctcagctcactgcaagctctacctcccaggctcaagtgatcctcccacttcagcctcccaagtagctgggactataggtatgtgccaccatacacctgactgatttttttaaatatttgtggagatgaagtatcactgtgttgctcaggatggtcttgaactgctgagctcaagctatcctctcactttggcttcccaaaatgctaggattataggcatgagccactgtgcccatcctaaaaattttttgaaacaaatggaaatggaataaaataaattaaaactatgagaacaatagaaaagatcaacaaagtgaaagtggtttttatggaaagttaaaatcgaaactttagctagactgagaaaaaaatagagaagacccaataaaatcagaaacaaaaaaggaaatataacaattgaaacctcagaaatacaaagcatcgttagagactgttatgaacaacctggaaaacctagaagtggaggaattcctgaacacatacaacctaccaagactgaaccataagaaatagaaaacttcaacaaaccaataacaagtagtgagatcagccgggtgtggtggctcatgcctgtaatcccagcactttgggaggctgaggtgggcagatcacgaggtcaggagatcgaaaccatcctagctaacacggtgaaaccccgtctgtactaaaaatacaaaatattagctgggcatggtggcgggtgtctgtagtcccagctacttgggaggctgaggcaggagaatggcgtaaacctgggatgcggagcttgcagtgagctgagatttcgcgactgcactccaacctgggtgacagagtgagagtctgtctcaaaaaaaaacacaaacaaacaagtaatgagatcaaagctgtagtttaaagtctcccatcaaagagatggagatgcaaggagggctcagtatatgcaaataaataagtgtggtacatcacatggacagaaccaataacaagaaccatttgattatttcaatagatgccaaaaaagcatttggtaaaattcagcatccctttatgataaagcccctcatcaaaatggaagtagaagaaatgattatgtaccttaataataatggaattattatacctcaataataaagaccataaatgacaaacccacaggtaacattgtactgactgggaaaagttgaagcctttcctcctaggaccagaacaagacaaggatgcccacttataccactttttttcaacgtaacagtgggaagtcctggccacagcaattaggcaaaggaaagaaataaaggacatccaaattggaaagggaagaagtcaaattagccttgtttgtagatgacatgatcttactcatagaaaaacctaaagacaccaccacaaaactgatagaactgataaacaaattcagtaaacttgcagcatacaaaatcaacatacaaaaatcataattgtaagtcagagacgatctgtgcaagtatctgtttgagtccctgttttcagttattttgggtatatacctaggagtggaattgcttgcttaaatcataattctatatttaactattaaggaaccaccatactgttttcacagcagctcaaccattttacattatcaccagcaatgcagaaggttctaatttctccactcttcactaacatatgttattttccattttttgattctagccatcctagtttgtgtaaagtggcatctcattgtgattctgattgcatttccttaatgactaattatgttgagtatcttttctcgtgcttattagccatttgtatatcttctttggagaaatatctattcagattttttacctatttttaaatttttttatttttattgtcaagtaaacttttttatatattatggacagcaaatccttatcagctatatgacacagatattttcttccgttttgcaggttgtcttttcactttcaagaaagtgtttttgttaaaaaagttttaaacttgcttgaagtctcactatttttgctttttttaaagaaagcaaacctttatgtaataatgagtgcaaacggctttgttgacacttacagaaataatagctaaatttaatgcaaatttgtgtgaattgaataactttgttacattttctaagctttatctttctatgaaatagggtcccattcacctataaaggatattttgggatttttcactaaaacttataaaatctgagaatgtgcttaggagactggagataaattttgtgagcctattatctagttagtaatgacaccatcttattaaatttcaaggtgttaaatatagcccattcaaatactcgtatatgtaatctaattattattgttatagaagttaaagctcccttgctgaacctatgattcttctaagctgctgaacatagagacacatgactgagcagtaggaggtgcttattgcttccagagttgcactatgcttgccttgatggcgtagaatggccataaagatgactgtggaaacagtgatttctaaactcttctcagagttttggatatgctccatatccaaatgaaacagatgactgtgttctgttctgtagattttactacttttctctgccagtagcctctcacatttgtcacgcaataggaaccaagcaagagaatctggacagatcagctcacatctattgccctgttaaagtaactcaaagatatgcccaaagaattggatacttgtttcatcattggataagctggaactgtctataagtggctaggatgtatcatgccttatcacaagaaatagcagaaaaaaaatatatagtctttgatttcattaaattcctttgtttgtttgtttgtttgtttatttttggacacagggtctctctctgtcacccaggctggagtgcagtggtggtgctaacatatctcactgcagccttgaactcttggctgaagcaatcctcctgcctcagccttctgagtagctgggactaccagtgcatgccaccatgcccagctaactttttcatttttttgtagaaatggggcctcactttgttgctcaggctgttcttgaactcctggcctcatgtgatcctctcaccttggcctcctaaagtgctgggattgcaggccagatgagccactgcacccagccaatttcacaaagtttcagtattctcagaaaagaacatactcatatctagaaatgtcttatgacttaaaaagcaaagtataaccatgtgcatattaatagggcacaaagtgaatctggtagagtgccagctgtgtctaatctgataagtttatttcatatggaaaatgtgtgtcaatcttagatgaggctaatttgttgaaaataactgaattctggtctcttttagattgtcagaaagggattcatttaacagtaaaatttaatccagatatatgtagtcatatgtttttaaactttttaaaccctgaaaattattgaaatatgtgccattttaatagtatcagcttctgattgcttttattccatcatcatgtgatatactcctcattaagcagcaccagtaaccagagtttaattattgtgtagcactgtgtgaaagcttttgtctctttatcatatatggcacagacagtactcttggttgtaagtagggatatccagcatagtttactgtctacatgcttatttctttagctttttttttttttgagatgaagtctcactctgtcgcccaggttagagtgcaatggcacaatctcagctcactgcagcctccgcctccaaggttcaagcaattcttccacctctgcctcccgagtagctgggattacaagtgtatgccaccacgcctggctaatttttgtatttttagtagagacagggtttcaccacattggccagactggtctcgaactcctgacctcaagtgatctgcccaccttggcctcccaaagtgctaggattacaggtgtgagccactgcgcccgacctctacatgcttatttctaagagctatataataaaacaatataactatacagattttgatggtttcctccagagcctttgccttgcttatcattgctgtgtgagaagggtagcagcactaaaccttgtgtttctagagatagaagtttgtccctgtgtactgtcgattaggacaggcagtttttcttgtcttgcctgaagaaaaacgtaacttttttgagatacaatctttctgataaggtaaatatgtttagcaaagccttattttgtggaaattttccaaggcttgaccctgtaacttctatagtagagaaaagggcagtgctttcaaacttttagctcttctcctggttggttgcctgccatggtcgtattttaaattgagtagcaagtaaataaatacttagcttctctctataaatgagctgtctgcaaagggtttctttgtactatatgactgttgtaaagtttcaatggagtaattataggaaaagaaaaagaacagatttttacttagtgctgtgttaatgccagtgtttgtatgcaataaaaatgactggccactcattgtttcagaaaatagatcttaacactcaaaagaaacaaattctaaaactttaataactttgaggaacactctttaaatacctagactttagatacatactattgtccaggatagatttcccagcatatttatctacaacagatcttaaatattgaaaactaacagaagttgttgcataaatttttctgcaattagataagaacatttttatggctggtctgcaaacagtccgtaaagatagttgctgcctatcatacttagagttaagggatgaactccattctttattttctaaactgtgattgcattatcctaaaatccagtggtttttctcacatacagtctaggattgagaggtccaaggccagtagggtgcctctgcctcctctcaagctgcttccattgatgggttcagggatttgttagagcttttaccatctccctgccaacaggggaaaggaagagagaatacatcccttccgttttaggggcacaagtatcaaatgacatatatcacttttatttaccaaccagacctaatcatatggccataccaagctgcagggatggctgggaatgatcatctttagatagataaccacaagcccaattgacaggaaggattattactaaaggaagaagcagagtggatactgaagtacaactttagtagtctctgccacagtaatacctctaaatgcatacatatgagtctgtaggaacagtcctacaaaggactggtgaagctttatattaatatatagtggtttccctttctttactgtctgcagaaagattctggctagattttttttttaaactttttcaacagccttataaaggtataagttatatagtataaaattcacctgtttgtgcaatttagcagagagttcacagagttatgcatccatcatcacatccagtttcagagtattttgaacacctccctaaaattccttcatgctcatttgcagtcagccctcatcctaccccccagatccattcacccctaatctgcttttatataaatggaatgtatgtataaatggaaccatacagtatttagtcttttgtacttggcttcttttacttggcataatgattttgaggttaatctctgctatagtaaataacagttatttcttcttttttgttgcataatagtagcttgttccttttcgttgcatagtgcattgtatggatagcccacattttgtttatccatttaccagttgatggactttttgcttgtttctagtttttggctactatgaataatgctcctatgaatgttccccacaagtttttctgtgaacatgtgttttcatttctcttgggttgatgcctaggagtgaaattgctgagtatagtaagtttatgtttaacttttaagaaattgccatactattttccaaagtggctataacattttatattcccaccagttatgtataaggattccagtttctccatatcctcaacaacacttgatgtcaatcatttttgtagtagtatctcatttgaggtttttatttatattttctaatggtgttgagccccttttcatgccctttatatattttctttggtaaaatgtctgttcagagtttttgcccttttttcttttgttttttagacagtcttgctctgtcaccaggctggaatgcagtggcgtgatctcagctcactgcaacctctgcctcgcaggttcaagcgattctcctgcctcagcctcccgagtagctaggactgcaggcacacgccaccacgtccagctaatttttgtatttttagtagagatggggtttcaccatgttggccaggatcatctcaatctctcgacctcatgatccgcccacctcggcctcccaaagtgctgggattataggcgtgagccaccactcccagcctttgcccatttttaaattgggttatttgtcttcctattgagtcatgagagttctttatatattatagaaataagtcctttatgacatatatgatttataaatattttttcccaatctgtggctttttaaaaattaatggtgtgttttgaaaagcaaaggttttaataacttagccatttttttcttttatggattatgcttttggtgtcatctaataaatcttggcctaatccaagactgcaaagactttctcttatgttttcttctaaatgttttatagttttcactgttatatttaagtctataataaatttttctttagttttttttttttttttggtatggtatgaggtaagggtctatgtacattttttttttgtatagggctatccaattatcccagcactatttgttgaaaagattattctttcccctattgaatttccctggcaactttgttgaaagtcagatgaccataagggtttatgtctgaactctcaattctgttctgttaatctatatgtctctctttacctggctagatttttaagactttcacagtaatgtttctgaattcaccttcttgcttttacatgcaatcttgtcaatgatgggacctgaaatgacctcacaacacttaaatatcgctgaaaagagtgatccagaagctgaacaaagttttatattcataagccagataaataaatacaagataagaagcatgtcaacccagaggggaaaagggccaaaagggaaaatatgatagtcacaaatatgaagtttttttgtattaaaatacaggttaacgaagagatctaaccagatagttgcttaaacaagaaagatcttcatttttgtcttttagtgtcagtttcagtatacacaatccaaatttgatgtggtggctgcgttgaagtcaggaaatcagactcgctctactatctcaaaggagagcatatctcgtcctttgaaggaagtttcacacattaattttattcattccattggtgaaaacttgtcactggccatacctagatgcaaacagcacttggaagcataatctttagctgaaggccgtgtgcccaactaagacttacattactaaataacaagcaggtgtcttagtcaactcggactgccataaccaaacaccgtatacaatatcacttaaacaatgaatatttatgtctgcagttttggaggctgggaaatacaagatcagtgttccagtagatttggttcctggtgagaactcttttcctggcttgcagatagccacctttttgttgtattctcacatggcagagagggagagttttggtttctcttcctcttcttgtaaggacactaataatcatgggggctccaccctcatgactttatcaaaacctagttacctctcaaaggctgcacctccaaatgccatcacattggctgttagggcttcagtatctcagtgtgggagtgggttggggaggacataaacattcggttcatatcagggaaaatgcacacttagaggaaattggcaggttatgcttccaattacatcagtattacagatttataaatatgtgttgatattatgtatacatcagaatatataatgtatgtatgtgttgatattatgtatacatcagaagacaaacattgaggacttacattggagacactgttatggcgattgcaaagactgcctttagtgagatttccagaatttaacagctggtggaaggggaggcagttatagtgttataactttataaatgttatttctaaactgaaaatgccattttaattttccaaacacaatcactgcagatctaagctgcactatttacagtttttgtagctaccttgatatagtaattcttcacttcaaaaaatatgtattgaggctgggcgtggtggctcacgcctgtaaccccagcactttgggaggctgaggtgggttgatcacctgaggtcaggagttcaagaccagcctggccaacatgacaaaaccccatctctactaaaaatacaaaaagtagccaggcatgctggcgattacccgtgatcccagctatgcaggaggctgaggcaggagaattgctggaacctgggaggcagagttgcagtgtgctgagatcgtgccactagcactccagcctgggtgacagagtgagactctgtcttaaaaaaaaaaaaaaaaaagcccaaaaaacatgtatacgtgtattgagtgcctgtcatgtgtcagggatacaggggtaagttgtctgtaaccagaaatacaattatgtttggcctcaaacagaaagcagagtcttctcatcctgaaatattgcagttttaataataatataagaggcctttataatttagaactattatgaagtaattatgttttggaaaaatcccaggactggatgcaaagagacttaagtgtatgtcccagttctgtcactcatcgggcaactgtgggctgacctgtttcctcaggtttaaattgaaggagtttattatatattttagtttctacagtctcctttgtttctatgattctgtagctctaattatctataatgtatatatttatgtgaaatatactttattatctataatctgtacatttctatgattccatagctccagttatctttaatctgtagtcctagagtatttattgcaaaccacctcaaaacagtgtcataaaacaatggcagttatgctcacagaatctgcggagcaagaattcacacagggccaggcatggtggctcacgcctgcaatcccagcattttgggtggccaaagtaggagaattgcttgagctcaggagttagagatcagcctgggcaacatagtgaaacctcgtctctagaaaaaaagtttaaaaattagccaggcatactgctgtgcacctgtagtcccagctacctgggaggctgaggttgcttgagcccaggaggtcatggctatagtgagccaaaattgtgccactgcgcttcatcctgggagacagagcaagatcttttttcaaaaaagaagaaaagaattcagagcctgggcaacaaagtgagacccacccccccgatctctacacaaaattcaaaattaaaatttaaaaatttgtctcgtacagtggcatgtgcttgtagtctcggctattcaggaggcttgaggtgggagaattgcttaagcctaggagttagaggctgcagtgagctctgatcgtgccactgcatctgcctaagcgacagagcaagaccttgtcttttttctttttttttttttttttgagacagagtcttgctctttcacccaggctggggtgcaatggcacgatctcggctcactgcaacctccgcctcccaggttcaagtgattctcccgcctcagccttccgagtagctgggattacagacatgcgccgccatgtccagctaattttgtatttttagtagagacggggtttctccatgttggtcaggctggtctcgaactcccgacctcaggcgatccgcccgccttgacctcccaaagtgctgggattacaggcgtgagccactgcgcctggccaatccgtggttctttactcttgtgtcagccacctgaagtgggatgtttcaaagacagggctcagctgggaccattaactgaaacacctacttcggcttctccgtatgtcttgagcttcttcacagcatagtgccctgaatgtcttacatggcagctcagggttctcagaactggtgttctccaagggaaagtttttgtcttataaaataattaaaaatattttagtgtaataaaaaaattaagaattatttttaagccaggcatggtggctcactcctgtaatctcagtactttgggaggccaaggtgggaggattgcttgaatccaggaattcaagaccagcctgagaaacaaagcaacacagtgtttctacaaaaaaaaattaaaaaattatctgggcacagtggttatgcctgtagtcccagctacttgggaggttgaggcaggaggatcacttgagcccaggagtttcaggctgcagtgagctatgatcatgccactgcactccagcctggacaacatagaccttgtctcaaaacaaaacaaaaaaagaattattcaaaccaaattgatgaaaagtgttaagtattaggtaagtagagttataaaagtttatttggggtcaccaggaacttaaaactggcatttattgggtgtatactatatgcttggcattggaccataagcacttttgtggattataatgtgatttattcttcacaacagccttatgcagaaaccaaggcttagagaagttaagcatcttgtccaggtcataatgctaagtggctgaactgtgactcaaaacagatctaactccaatgttagtggcctaactactgtattagtccattttcacatgctaataaagacatacctgagactgggcagtttgcaaaggcaagaggtttaatggagaagtcacagttctacctggctggggaagcctcacaatcgtggcagaaggcaaggaggagcaagtcatgtcttacatggatggcagcaggcaaagagagagctggtgcagggaaactcccatttttaaaaccattagaacttgtaagactcattcactatcaggagaacagtgcaggaaagattcacctccataattcagtcacctctgaccaggttcctctcacaacacatgggaattacaattcaagtgggagttacaactgaagatgagacttggatggggatgcagccaaaccatatcaactactgttacgagttgaattgtctttaccgcatccctaattcatatgttgaatatgactatatttggagtatagtcagcatctcagaatatgactatatttagaggtagggtctttaaagtggtaattaaggtaaaaggaggtcattggggaaggttctaatccaatatgattagtgtccttgtaagaagaggaaatttggacacagacacacacaaaggaaagatcatgtgaggatacagggagaagatggccatctacaagccacgaattgagccctcagaagatacaaccattgccaacaacctttatcttggatttctagcctccaaaactgttaggaaagaaatttctattggttaagcccttcagtctgtggtactttgtttttttgttgttgtttgagacggagtcttgctctgtcgcccaggctggagtacagtggagcgatcttggctcactgcagcctccgcctcccgggttcaagcaattctcctgcctcagcttcctaagtggctgggattacaggcacatgccaccatgcccagctaatttttgtatttttttagtagaaacggggttttaccatgttggccaggctggtctcaaactcctgaccttgtgatccacctgccgcggcctcccagtgtgctgggattacaggcatgagccactgcgcccggcccagtctgtggtactttgttatggcagccctagcgaactaataacgtcactaatagcacattactaatgtgcatacctgggttttgttttgtttttttaaacctgttttaatcagcctactttagtgctgtccttcccattgccctctctcttacaaagatattgtggacagatacatttgttttttatagacctacaaactttcttaccattatcacatgctgagacatataataaaggtgtacaattcttcaaggtaaaaatacctccacatgggcatactctttcctataggataaaattagagttcttccctcttttgagatgtgagcatcaattaatagcccctaaggagtttattttctgcaaagatcaagattaattacaattgtttcaaagtaatccggaaatcaatgtggaaatctctggttttataaagctagttatcagctgctaacgaactgtctaaatatgccaaaaattgaactttatcatgtagcatttaccttctgaaccatgtatttatttattatggtctgtcatgtttgaattttttgtcttgtgttatatatataaatcttgcctccctaataatgagcttcctaaagatgcacatttttgaatcctctttagttagtaaaatgtaatgaatgcatttgtaggtgagcactaaatgctattaaactgaattgtaattttcagatttaggtattttgtgtacagtttccctctaaactccacttttgaaacactattgaaatcaatatgggggatgctgttttgatacattcactctgcccttcaatttttttaagtataatttccattttatttttctccagaagatagcttttcttcagtccttaaaaactcagcttcttacacaggcttggtagtggttgtagggcagcacccggaggcctaaaaatgggtgtttagtcattcccagcttcataagaacaattcctgtctaccttgctatgggtggcaccactcacacagtaacgcagttttacatacatcttgggaagcgcatagacatcaaagacactccagaaataatccctgacagctgtagcctctactatgtttcaaatgatgaacttcttaaaatggccttgtccttgggcacgcatcaggcgcagtttatgcagcaaatagacagcatgtggctgcagctctttttggcatgaccattgttccttctttatttgtcatcttggaagcaaggactgaagagctgcctttcaatttttaaaaccacagtcttctttcctgacatgttccttagacagtggctctctctcgcagcactgttttctcaccctggggcttaagaacataacctatcaatgtattggaagagaaatgtttctgaataaggaccaggcctttgatcattttgtgagatattcatggtctcctctatctgaaagagcaatgataacattatttccaaaactggaactcatgcatattcacatctcaagtatactaaaacttttcattttctggtgaagaaattcaatgtagtggttaaaagtgtgggctctgtcttagttcaaatcccttctgtgccaactaccagctgtgtgattttaggcaaatcaacttaatcttgttgaaccttgatttcctgttctataaaatgtagccaattatagaggataggccaggcacagtggctcatgcctagaatcccagcactttgggaggcccaggtagaaggatcacttgagcccaggaatttgagaccagcccgggcaacagagggagaccttgtctctacagaaatatcaaacagccaagtatggtggcacatgcctgtggtcccagctacttggggggtcaaggagattgaggctgcagaactacggacacatcactgtactccagattgtgtgacagaacaagaccctatctcagaaaaaaaaaaaaaagtagagcatatctatagagttgtagaaataaataaggtaaggtgtgttatatgcttataatagcacatgggacataggaaatcttcagtaaatgttagtcattattatcattaccattatttattggctatccagatattggagaaaactgaaatcgaccttaagactgatttgtgtaaagcacagtaagtattcagtgaatgtttattgggtaataaagacatgtcaagtgtatatggaggctttattgaatagattaccatttttcaaaaacaatgaaaggttttaaacagtttatttcagcacctcctcaatgaactggagctcaaagccttaccctagtgccctgtctggatgagtgacacatagccaaattatataataatgttaattatttgaggatattgtatataaacaaacatttagaagtcagtttgctgaccaagtacggaggcttatgcctgtaatcccagcactttgggagcccaggcgggtggatcacttgaggtcaggagtttgagacagcctggccaacatgttgaaaccccatctctactaaaaatacaaaaattagctgagtgtggtggcacgtgcctgtaatcccagctacttgggaggctgaggcaggagaatcgcgtcaacctgggaggtggaggttgcagtgagctgagattgtgccactgcattccagcctgggcgactgagcgagactgtctcaaaaaaaaaaaaaaaaagaaaaaagaaaaagtcggtttgtttaattgtagcttttgtcacctctaagatttaatcaggaaagtatttagtcaaaacttacactgctgagtagtttcattaggagatgcaaatatgactaagctattacacctggttcagggcttgtaagcattcactttcaaactactggacagtctagaaagcttcataagaaagatacaaagtactgactgggcacagtggctcacacctgtaatcccagcactttgggagggcaaggtgtgtggatcacgaggtcgagagattgagactatcctggccaacatggtgaaaccacatctttactaaaaatacaaaaatcagccgggcatgatagtgtatgcctgtagtcccagctacttgggaggctgaggcaggagaatctcttgaacccgggaggcagaggttgaagtgagccgagattgcgccactgcactccaatgtggtgacagagcaagactctgtctcaaaaaaaaaaaaaaaaaaaaagagagagatacaaagtactactgaaatctagaaaaggggaaagagcatctcttactgcagaatcagaagggaggacttcatgaaataaatggcatttatggagaactctaaaggatgactttgcttcctacttcgcagagcatttagggtaattggattctgctcagatgtattacttttccccaggcccagaaaagattttgtccccctgctattcaacattaatctattcaaccttgctttagatctggtccttcccatcttcctcagagccttgcatggaaggataatctcaacgggcacgatggtggcaacttatgatgaccttccttaagcctggaacatgttaactctcgaattaagaaaaatcagtcactattacagaccccgagaattccctacttagtagagcttaagtttaagtagagacaggcaataaacacaatacctaagtaaaaatccatagtactgtatattagaagataactaatgtggaaaaaataggacaaggtcaggaagatcagtagtgctggaagagtgcagtgttaaatagggtagtaagggtagatttcactgaaaaggtacatttgcgcaaggacttgactgaagcaagggagtgatccatccacatggctagatagagggaagaattttcaaaagagaaaagacagcgggtgggccgggcctggtggctcatgcctgtaatcccagcactttgggaggctgaggcgggcgtatcacaaggtcagtagattgagaccatcctggctaacacggtgaaaccccgtctctactaaaaatacaaaaaattacccgggcgtggtggcgggcgcctggaggttgaggcaggagaatggcgtgaacccaggaggcggagcttgcagtgagccgagatcacgccactgcactccagcctgggagacagagcgagactcgagactccgtctcaaaaaaaaaaaaaaaaaaaaaaaaccagcaaaaaacaacaacaaaaaaaacagctggtgaaaaaaccttggcaggagcatgtctggtgtaccggaggaaccacaaggaggctagagcatgatgagataagaggagagtggaggagaccagacgtagaatagccggggagaaagcgagccaggtaggggagggctttgtaggccatggcaaggcatttggtctgtaattcttttatgatttgtgcttttggtcttgatttcttccttatgaatcatagatgatgaggacttagaggaggaaaagaagaattgttaattatcctctttttaaaaacggaatttatagattttcataaagatgaaaatgttctatatgtaaatttttttgaatatttgtttttcttttttcagtttttagttttttgtgcaattaaaaaaatataatgtgagatagagaacctgatttttctcattttgttattttggttttttgggtttgttgttggttttttttttgtttttgttttttttttgtgttttttttttttttttgataccaggctgcagtggtgtgatcttggctgactgcaacctctcctcccaggttcaagtgattctcatgcctcagcctcccaagtagctgggtctacaggtgtgcgccaccataccctgcctatttttctcattttgatcgccagttgtctgaccaacatttattaaataacttatcttttccccacctatttgtaataatactgccttaattttgtgtctgggctctttaatactgatttgttgatctgttcctgagctagtatgtcacagtttcaattagtaaaacttattataaatctttgatgtctagtagagcaaatgccttttcctttattattgtttcactattcttggtccttttctcttcagtaagaattttttgatcactttgtcaaggctcatattttaaaaatcctttgagatattgaatagaagtgtgttacatttatgaattgattatggaagaattgatatcttcatatagttcagtctccccatccgttttatttaaaccctcttttatgttaacaaaagtttttagaaaattctgcatagaggttttatcattagatttatttccaaagaccttaagtttttgtagtaagaatgaatgggctctgtttttattacattttaaattggttgttgctagtgtatagacatactattaactttgtaaattaatctcgtatgtaacaaacttgttaatgtctttctaagtggttttattgttttatcaatatgttgttttagatttttctaattaaatgactacaatcgtctgtaaaaaatgaagatttttgccttttctaatttttaactttatatttattacatcatcttacggcatcaacagtaacttctctgttaaaagggccatgacagctggacatggtggctcacacctgtaatcccagcactttgggaggcctaggcaggtggatcacaaggtcaggagtttgagaccagcctggccaatatggtgaaaccctgtctctactaaaaatacaaaaattagccaggcgtggtggcacacacctgtaattccagttactccagaggctgaggcagaagaattgcttgaacccaggaggcagaggttgcagtgagctgagattgcaccactgcactccagcctgggtgacagaataagactccgtctcaaaaaaaaaaaaaagtgggggggccatgacaataagcatccttatgttgttcctgattttaaagggaacatttttaagatttcactgttaaagattttgtgtgctttaggttcagattgatcatttatgttgggttaatagttaatagtctattctattctgttcaaattctaatttgccaagatttttaattattaaaactgcaattacttttgcaccaacctagtattaataggtatttaattttattaagtgttgtttgtatatctgttgatgaatttgtgatttttatcctgtaatatgtgaattatagtaatatttcttcttctttttttaaattagagatagggtctcgctgcattgcccaggctggtctcgaactcctgagctcatgcagtcctcctgccttggtctcccaaagtgctgtgattacaggaatgagacaacacaccaagccatatttcctctctttttaaagacgttttagagacatggttttgctatgttgatcagactggagtgcaatggctagtcacaggtgtgatcatagtgcactatagcactgaaatcctaggttcaagcgattttcctgccttggcatcccgagtagctaggactataggtgcacaccaccacagctggatgatgtttcttcttttaaaataatattttaaatagtaaaaatgaagctgttaaaaaatctgaaatgtaaatttgaacccctctaaagctactctttcatttcacttccctgtttcaaagaacagtaccattcagcctaaaatcttaggagctaatctaggcattgctcacagctgcttggtgaccagatcctgtcattttcaatattgtcgttgcctctctattctttctttgttgcctaattattctccatgtacctgcaagagcagaaaattcctttgattaaaatctttcagtgattccctaatctgtagccttcacaaatttgaactccttactgtgccctataaggcccttcaagatctggcccttccttctccagccttgcaggcccttcttgttgcactctacttcccactgattcgccagcaaatcagtcattccttggggcctttatttagcattcctctctttgtctagctgtctagcagttactcatttttccaggcccagccaagccttatctacctccataatatatgtcctaacttccagatagagtagaccgttgaatctttgtacatcctcctatgccatacaaaccttaatcttttgaaattgtgtatggtctttattcatttatgtatttatttcatctactagacttgtatctagtatcttgaagtttgtgactattttattcaccattgtattcctaacacagtgaaggtattcagttcacgtataatgatgaataaacaaaagaacaagcagacaggcaatgattgagataaaagagaaagggattattccaaaaggaaaataatgaaagcaaaagccttgttaactgttaatttcattatctacattgagtcctgggtggagccttagggaactcgggaaatgattctaatgattgtctactgattgagggaaaagattccctgacctgcaatcttttgcaaatttgttgcctttttttctctctttatgaagaagctttttctattttcctctctttggggattttctttcttttgaattcatttagtcagttaatatttattgattacttgctatataccaggctcagtgctagtgctgggaactagttagatagagcctgtctctaccctggagtatctctctggctggctggggtacaaacatgtaaacaaacaaatatagcagtgattttcaaatatctttcctaattgtcttgtcatgtttttccaccatgaaacccaccttgtaaagaagattggctgttatgttctcactcataggtgggaattgaacaatgataacacttggacacaggaaggggaacatcacacactggggcctgtcgtggggtggggctggggggagggatagcattaggagatatacctaatgtaaatgacgagttaatgggtgcagcacaccaacatggcaaatgtatacatatgtaacaaacctgaacactgtgcacatgtaccctagaacttaaaatacaataataataaaaaagaagattggctgtttattggggttttaacagttgtatttggcaaacaaaagaataactggaagtaactgagaataggatgctggaaggaaattgtctgagatgccactctcctggtttatttactactgtcttcctcactttcaactgtcagcattgaaggattgtattcctcagttaggtaaaaaatatgaccaatttatctgctttaattagttagaaattagaaatttaggggccagacacagtggctcatgcctgtaatcccagcactttgggaggccaagctgggaggatcacttgaggccagagtttgagaccagcctgggcaacataacgagatcctatctccagaagcaaattttaaaaatcagccaggtgtagtggcatgcgcctgtagtcccaactacgaggcagctgaggcaggattatggcttgagcccaagaggtcgaggctacagtgagctatgatcatatcactgcgctatattccagcctgggtgacagagggagacactgtctctacaaaaaataaataaataaataaataaataaataaataaataaataaataagaaatttaggaagtatattcatctctactgattttaaagcaaaatttaatttttttttttttttttttttgagatagggtcttgctctgtctcccaggctggagtgcagtgatgcaatctcagctcactgcagcctcagcctcctgggctcaagtgatcctcccacctcagcctcctgagtacctgggactacagacaagtgccaccatgccagattttttttttttttttgtaaagacagagttttgccatgttgctctggctggtctcaaactcctgggctcatgcaatccactcaccttgtgctcccaaagtgttgggattacaggtgtgaactaccatggctggctgctaaaagtaatttctttaactcctttaaaaatttttattttatgtatttacttatgagatggggactcagtttgttgaccagactggccttgaactcctggcctctagcaatcctcctgcctcagcctctcaagtagctgggattacaagtgtatataccaccacacctagatcaaacttcttttttttttttttgagacaggatcttgctgtgttacccaggctggagtacagtgtcagatggcaggatcttggcttcctgggctcaagcagtcctcctacctcagtctctctggtagctgtgcctgcagtcacatgccaccatgcctggctaattttttattttttgtagagatagggtttcactgtgttctccaggctggtattaaactcctggactccagcaatcctcccaccttggccttccaaagtgctgggattataggcatgagccactgcgcccagcatacgaacccatttttaagttgtcaaacatacacaaaagtagagagaagagcaccgtgaacatccacgtagtcatcacccagcttcagtaaccttcagcctcatgcttttcttgttttatatctcccccatctttttttgcaagagtattaggtaaaaatttcagacatatcattttactcataaatatttaagtatatatcttaacacataaggactttaaaatcataaccataatattgatatcagacccactgaaattaatattctaatagtgggtgcatttttaaaattcaaatgaatatgaaacaaccagagtccaagtaaaggaacttataccatgttctaatttaccaagtaggggatagtttggcttttaaccccaaatgtagtgggatttttttttgttattttagccagaaacatttaaaaatcatcccatcattgtcccctcttttaaaacagagtaacaaagtaagcagagtgaatgctcttaatttataattttattttcagggtattttacaatatactgtgggtgatgggaatgaatatgtgtccagcaaaacttgatattttcttatatgatgaatatttcccattttatttaaaaggcaaagctgatgggatattctttgcattatattctgaaaataaaaatcagaatccctgctgctaatggtgagactgatattctaataccctagttctaagcctagctttgaatgctttgaataagggaagtcattccttatgacttccaatagataatgctttgtttcactgatcctctttcagggattttctttgtgaggcttttcaagctaaatagaagccagtacttctgagccaaattaaaccttgcttcagccctggaaagacttgcatgtttttttaaaaagagactagggaagaaacagttattgtcatatgttttactaggctatattagtcatctcagccacgtagttctattttgctctttgcctaaaggtattaaaaattttaattaatttgtaagctgtagccatctcaagttcagttataaaataaactgatggtactttagatgtgcatttaccacttgccatcggtcttctgtgcactaaagaaagcaaaagatgacttatattttataccagaggtctttgttaatatttcacctaaaaaaattaaatatattgccttttattacttcctgtttgaacctacaatcaagtggagaaataccatgtgaaagattgtacatgttggcttctctggtagaagacattgtttgccttccattttgtacctaggggtagatttttgaggcttgcctgcttaccattaaaataagatttaaattataaaatttctttagactgcttttttggttttttttttttttttttttttttgcctgtccagtgaagttttgagctatacttgctcaaaacactgactataccttgagctctgaatgatagataagcagttagatagtaaacagagtagaattggtaaattagaaaggacccagaggaatcatctggtacttttccttcatataggatgaaggaaaccgctccaggaagtgatccttttctctaaggttttcaaagagggatgtttattcatttatttaatacttctttgtttttttttttttaaaagaagaatgctgagcctgatgctgtgtttaactctctccttagtcaccctcagcctggaatagtttctcagtctttgacttttataatgttgatacttttgaagatgacaagctagttatttagtagaatgtttctccatttgagtttgtctggtggttccttaagattagatttaggatatgtatcatgagcaagaatattatagaagtgatgctgtttttctcatcccattcattctatcagatggagtatgattttaatttgtctcattggctggtgatgcttactctgatcatttgaccaaggtgatttctgcaaggttctttatgtaaagttgctctattccccttcctgacaaataagaattttgtggcgaagtactttgaaattatataaatatccaattcctaataaaactttcaatttatttcatttatatatagaatcatgatttcctgtttattcagtattatatcttattctaccattatttattttaatgctgaaattatcccctacttggccactgggagctccttcaggatggcttttgtgtccttttgacatgtttccattattcttcaagcgtaacttgcttttggaaaagcaagatattccaggctctttttgtactttgctggcactagccctagaatcaggtatttctccaagtagccctggttctttttggtagacactgatatatagcaaccaagatctgtgcagtagatttgctcattgtttctggatatgtattgttgcttctatatcttctcagcagacagaactagggactaaacacacacacacttacatacatacatgcatacatacatacatacatacatttatacatacatacatacatacatacaaacatacatacatttatatgcatttgcacctgtatttcttcaaccccacagagctcattctagtttttcatctttctggatcctgaacttcctgataaatcccccagtatttgccaagtagccacctctttaattgtgtggttaccctcttcaccctgttaaaatgctgcatgccagattgcacccttccatggatgcctttctgacattctgcttgggctccaacacatctgtgtcaggctgccactcttcataaatgcccttattacgatgcttgggccaggtctccccaagcacatgaaaaactgcactgttttcgtgggtttggataccaaagaaaattgaatgactgaaaagtactgaagagtttaccttaaagggaggaaactagagcagaagttctccaaatgtgatctctagactcagaacatcagcaccccctgggaacttcttggaaatgcagattcttaggctccatctcagatctgaatcagaaactctggttatggggcccagcaatttgtgctttaacaagctttctagggaattctggcacatactagtgtttgagaccctctatccaaaggagagatagagtctcaacttagtattctatcctgcatctaggttatctctggcataatgaagactccctggttgtcaaggtcttggtacaattttttagggctttggagccatcctagaaatgaagtcctcccatatggatcaagactggaataattatccagttcaacccaccatccgtggaaaacccaatcctctagggaaaatcaaggaattatactcgaattaaactgtgctttgtctttttggtatagaaacattttaattaaagccttacagttaataaatatttaaaggaaggaccagaaattagtatcaaagaaataaaagttttgcagttttcatttttgtttttttgttgttgttgttgttattttgagatggagtctcactctgttgcccaggctggagtacaatggcacaatctcagctcactgcaacctccacctcctgggttcaagcaattctcctgcctcagcctcccaagtagctggggttacaggcatgcaccaccacacccagctaattttgtatttttagtagagacggggtttcaccatgtaggtcaggctggtctcgaactcctgacctcaggtgatccacctgcctcggcctcccaggtgctgggattacaggcatgagccaccacgcccggccgaaagttgtacagtttttacttattttaagctcacatctgatgtaagaatgtacagttaatgaactgttactctcccgtactggctgtgttttctacagtatcaaaaatatacttcaaggccaggcatggtggctcgcgtgtgtaatcccagcactttgggaggctgaggcaggtggatcagttgcttgagcccaggagtttgagaccagttgggcagcacagcaaaacctcatctccccaaaaaaatacaaaaaatagctgctagtggtggcatgcacctgtggtcccagctactcaggagggtaagatggtagaatggcttgagcccaggaggtcatgccttcagtaaactgagataataccactgcacgccagcctaggcaccagagtgataccctatctcattcatatatgtgtgtgtgtatgtgtgtgtatacacatatatatgcttcacaaattttacttatatatagacatagaggcttacatttcaggtaaataagataggctccgtataaagcaatttgagaataagaaagttttatctctttttcttgagtggcatgaaaagataaacaaaatactttatttacagtagagaacacagcatattcaaattcagtattgtgaccttcacctcaactggattagccaggtagtatgttacttgcttagattcctgggtcagatgtgtcctgtatcctttagcttttctgtcagcaaaaagggataattaggacacagaacctgaattttaaaatggtttcagtttaaattaaagattcccttgaattaaagctgattcccttcttaaaggtgattgatatttatgatttttcattgtctttgttctcaaggagacttttattgtcttactgcaaaatttttgtaaatatctttgagttctgttttttctgagtttatgtgattaaggttttgagaatatctagatatagtacttctgactttttccagacaagaaacaagacatataaacatatacccactcacatttacaaagcctaggagatgaagtttcacgtaatatggactttggcttaattttgtctcgttcttataaataatcctttgaaaatgtgtctcagaaaatcattaacactgaaaaaggaaatatgaaagacttagaattctgaaaattataacatagtagactttttaatttattatcatttgtgatttcaacatttttgtgggattaccttaagagccatgacactgtaacactttgtaattttgtaaaagtcctgattgtcaatatatgcccagtgagggttggtaaagaataaatcttggccaggcacagtggctcacgcctgtaatcccagcactttgggaggccgaggcgggcggatcacctgagatcaggagttcgagatcagcctgggcaacacagtgaaaccccgtctctactaaaaataaaaaattagctgagcgtggtggcacatgcctgtaatcccagctactcagaaggctgaggcaggagaatcgcttgaacctggaaggcagaggaggtggtgagccaagattgcaccattgcactccagcctggacaacaagagtaaacctccatctcaccaaaaaaaaaaaaaaaaaaaaaaaaagagtaagtcttgataagcacacttgtttttgcagtatgtagatttaaatttaactttgtttctgggtagaaaatatatccagaaaaaaagccaaccactagtgctgatattagaattgatgagaacacaaagtccaaggacatgatgatatttaccaaggaaagagcagcttctgctgggtgtagtagctcacgctggtaatctcacaactttgaaaggctgaggtaagagaatcacttgattctcttagtagttcgagaccagcctgggcaatgtggcaagacctggtctctactaaaaataagaaaattagctgggagtgctggcatagacctgtggtgccagctacacagaaggctgaggcaggcagattgcttgagcccaggaattcaagaccagcctgggcaacatggcgaaaccctgtctccacaaaaaatacaaaaattagcttggtatggtggcacatgtctgtagtcccagctcctgtggtgggaggatcacctgagcctgggaggtcaaggctgcagtgagccatgagcatgtcactgtagcactccagcctgggcaacagagcaagaccctttctcaaaaaataaataaatacattgaagcattctttgaattggcagatatatgttttgaacctaaatgactggacaccttatagagacaacaaagtgctccctaacactaacttaatcaagatgttagccagtaaatatttgcttatgaaaagatgaaactttactaagaattagaaagtagcagagcttattactttgatcccatgtttatataaatcactttctttttttaattattaatttgcattttatagcttcaattatataattacatgttacactataagtgacatttgaaaaaattgtcttaggacaactgtcatatacatcaaggtctgtagtgagaatgaggaaggaccataatttttataagattaattttttttttttttttttttttttgtgagatggagccttgctctgttgcccaggctggagtgcagtggtatgatctcggctcactgcaacctccacctctgagttcaagcgattcttctgcctcagcctcctgagcagctgtgactacaggctcctgccaccacgcccgggtaatttttgtatttttagtagagatagggtttcaccgtgttggccaggctggcctcaaactcctgacctcaggtgatctacccgcttcggcctcccaaagtgctgggattacaggcgtgagctaccaagcccagccaagattaatttttttttctttttgagacagagttttgctcttgttgcccaggctggagtgcaatggtgtgatctcgactcactgcaacctctgcctccctggttcaggcaatttccttgcctcagcctcacaagtagctgggataataggtgcccgccaccacaccccgctgatttttttcatttttagtagagatggggtttcaccatgttggccaggctggtctcaaactcctaacctcaggcgatccacctgcctcggcctcccaaagtgctgggattacaggcatgagccaccgcatccagcccaagattaatttttaaatagcaatacttcattaaatatatatatatatatcttgcagttagaaactgtcataaatgtattacagtgcttggtgctggtttgttttgttttgttgtttgtttgtttgtttgagatggagtcttgctttatcacccaggctggagtgcagtggcacgatctcagctcactgcaaccttcacctcccgggttcaagtgattctcctgcctcagcctcccaagtagctgggattacaggcgcccgccaccaagcccagctaatttttttttctttcttttttttgtattttagtagagatggggtttcatcatgttggtcaggctggtctcaaactcctgacctcgtgatctgcccgcctcagcctcccaaagtgctaggattacaggcatgagccaccgtgcctgtcacatttcaggttattaatgagtatatttcccttgagctaaaagcatataacacagatttccatctataaataattttacatatgtattccaaagcccttggatgtagaggggaaatgggtaatatttagcaaattccagcctgtccttttcaattactaaagaaatacaggtatacctcactacttgaattcaggtgatttggatagcaatactgtatgtctgtagatttctctgctaaggcttatgtctagattttaccacattcaccaggcttagtgttcccaccctgtgggtagctgacatcttcacatagtttcttgtaataaaatataattaaatagtgtttaaatgttaaattagattcttcctccctctctttccctttctccatccatcctcagtttaattagttacccagtactttttccacacccaccatttggaggaagtttgtgacagagtgagttgatgagggtacttttgatttcactgtgtttcctattgcagtcattctctgaaaaatgatcaaagacattggaattatgaaagacagcaacagactcggcttcagaagatcccattgagtgtttttccttgcgctagttatatagtcagtttcccccttgtaaattattacagtgggggatttattagggaaaacatcatttaaaaattttaacggccgtgataaactgtcatttgcagttctcagctgacagtcaaacagctgcaatctgttagtgagcttttactttcagctgccagaggtctttcaactcctgttcccctggaaatgaggagggctgggctggacgcatagaagggaagtgagggttgaaatacacattttcccataccatatttttcatgcctccccacagtttccatagaaatgggaacataaataacaccccaccccagactttgaagagcaatcgtttatgtgtaaactgcagtagatggaccttaaagaggcacacaaaataagctaatcttagggtctttcctttacttgtgtttggccaagcctaatttcagatagattctcatttgatttactctgtacttaaaaaatgattcgatttttttaaatcaatttttagaaagtttgatattacctttttttctgaaatgagaattatcttgaacatactttgattgataggtatatatctgttgtttatgtgttaaaaatctagcaagcttggtgttctaactttcctctcatgtttgttctatccaagattaaagaaatgaattttgggccaggtgtagtggctcatgcctgtaatcccagcactttgggagactgaggcaggcaaatcacttcagatgaggaatttgagaccagcctggccaacatggcgaaaccccgtctctactaaaaaagtacaaaaattagctgggtgtggtggtgcgtgcctgttaccatctacttgggaggctgaggcagaagaattgcttgaacccaagaagcggaggttgcagtaagctgagattgcgccagcctgggtgatacagcgagactctgtctcacaaaaaaaaaaaaaaagaaaaaaagaaatgagttttgatttagggaatgctccaattgcatagtataaaaggtcttctcaaatagtcttattcttatgcattattttagaaattgccccacagaacagaggtaattattggctctgtcaaacatatcagagaaaacttccaaatttaattggttatcacaattttctcatttaggtaacaagaatatcctatgttaaatgcatttctatgtttttccacttatcagctctgtgtcatcacatatttcctgtaacacccgtacttgaggaaaatgtatgggcatagtctttatctgtttcttttattccaacatttaactaattaacaaattccatttgaatcatgagacagtaagaatatgtgtaattgagtaaatctgctttaggcatctactaagtattcagctttatgttaggttgcagtagataccaactgtaagtaaggcagaattttttccttaaggcatcccaatggagtttggaaaattcataccccaggaatagctcataacagccatatgtgattattacatgagtgacatagactgattcccatgactaggaaaacttgtttcctttccctttctactgtcacctttttcacaaagtccctttctcctgatttattttcataacttcctaaatgtcctttcaattgctacctttctccttttgtttgtttgtttgtttcttttttttttttttctgagacaggatcctgctctgtcacccaggctggaatgcagttgcacgatcaatcatagctcactgcaacctcaaacttatgggcttaagggattcttctgcctcagcctctggagtagctgggactacaggcacataccactgaccatgcctggctaatttttttttaaaattttttgtagagatggggtctcgctttgttgcccaggctggtcttgaactcttgagctcaagtgatcctttcatctcagcctcccaaaatactagaatcacaagcgtgagccactgcacctaaccctttcttcttttctttatcttcccttctactttagcatatacatgatttccagattcatatttgtaaaaccagtcttgatccttttactattttaaaacctcagtgatctcttcacatcattgtgacaagatttttcttttaaaagacagttctaacgtcagatattctgcctcataagcctggctaccaaaacaatccaaaaacttttattattttaggttctttcatattccaaattgcttctcatatccagaatggatgcaaacatctgttaagaccatctgcctggtttttatttcagaaaatatggtcactgagctagcaactaccaaaataggttcatgctttcagcgattggcagcaacctagacagtcttcattctggcttcagtgtattccttccggcctgctctgcaggtaccttatgccaggtcatctagctcctcacccaaacagaactgcttagcacattcagtaggcccacattttgtagctccatgcctttgcttacagaagtttcctttaggtatgaggaaagatagaagcaataacaagttgttccttccatctggaacttcttgtccctccctatacccctctcatagccctatcctactgtaatacaatctgtaatttacattaaaacaccccagtctacacagcgtgttagttagtctacaccttggatgtgagtgattaacatttgaaacactgataagggaatacatagtgtaagggtagttgtttggcattggaaataccctaatgaggagataactactgtaaatttaacctgcttatctttaaatctacaccagagagttttctagttagcataaaggatgtcagaaataatttcaaattggattgattagaaataccatacaggttcctctggcacatgaattgctcataagattctggcaagccaggtagcctaatgcctgcacagtgtcacccgaggcagagcactgttcgggcctgttgactatcacctaacagaagatgcttcctacctggtagaaaggtagtgaggagacctatggccatgcctgtcttcagtctttggaggcactgatatataccctcctcctcccccaccaaaacgaaacaaaacaaaacaaaacaaaacaaaacaaaaccctgacacttcggaatggtcaatagcaaaacctccctccaggacgatgcttacatgctatctcttccttaaagtctatcctaaatttcctgatggatttgtgaactcattctcctctacaccatcatagaatgaggcttatatttctgttatggcattaataaaattttaaaatttattgtaagtttcttgatgaaaggactgtgtcataactttctttgtatcccacatagcatgtggcatagtgtcttgtacacagtagatatttattataatgagcacatgcatgtacttaccaattctgtaaggaacagatccagctttgggtcatagggacactgggagccaatgtgtgagttcttagagttccattaattcactgttcatagttctaagggagtcaggagtaattgtccataactacatggctctagttagccattagtgcaaagacacactgggactgatgtcaacagcagaggaaagtagtgctgtctatgttgtcttctttcagaaactcatacctaaatgtatttcatactgctgttcggccaaatctggctctagataataaagaaggacaaatatttagggcagttatttctcttgttctatatttcctagccaatttgaagcagtatatataactaaccaagtacaccaggagaaaagtaaaggaggtgcaattatagcacacagatttaaaaaacaaagcaaaataaaacatttaatgttagtaagatgatagtatagtataatagttcaaagcaaggatattaaacccagactgcctgggttcaaattaatccccactttactagctgtgtggccttgggcaagctatttaacctttctgtgcctttgttcttcttctgtaaaatgaagatgatagaacagcacctacttcagagatgtgaggctaaaatgaattcatacatgtaaagcatatagcactcagtgcctggcacataggaagtgctggatgtgtttgctgttcctgcagtgatatggttaaatcatagctccaaaggcagaagtatgctaatttcagtcagtgtgcagtccttctgtctgtgtgctttgcagttctccgcctccaactgagtaatcttaatgccttgaagcccccaaatattggtgcttatacctttcttgtggaacctgtcacattctaccctaaattatataattatttgtaagctccttaaaagcagaaactatcttctttgtcttcctctcagcacccagcagaatgattacataacagccttgcttacacaatagctctttgctaactatttggggaaactatgaacctctgtgaggttggtccctggaggccctgcaccttggactggttcctgtgtacctctcgtactcttcagctagcaatccctctcctcactgtgctccagcaactggccttaagtcccttaaacatgcatccttttccaaaactggcttgatgtgtgtgtgacctgtgcagtcacataggtcctcatacttggttgaatgctctatcactagcttgaaattcttagtttttgtgttcaatttttatcttgcactgagcctgcaaattatgtagccggtcttgctcttggtcatcctgtgctcattgttccctgtgcctggaacaccctttctccctaatcctcactggctaacctactcttcaaggctcagcttcattgtcattcctcagagaagcaataaaaattagagccatgtattagtatccctccacattttcttctccctcagagcacttaacttactttgtaaatacagtatttatttatattgtgattatttcttttaagactttatcccaggctgggtgcggtggctcatgcctgtaatcccagcactttgggaggctgaggtaggcggatcacgaggtcaggagttcgagaccagcctggccaacatggtgaaacctggtctctactaaaaatacaaaattagccagatgtggtggcgggcacctgtaatcccagctgctcaggaggctgagacaggagaaacccttgaacccaggaggtggaggttgcagtgagccgagatcacgccactgcactccagccggcgcgacagtgcgagactccatctcaaaaaaaaagactttctccccaccagactgtaaactcctccaggggatagactgtgcctttgttccaggacggctttacctgctacatagtaaatagtaaataaatatttgttgagtgagtgaatgaataaatcatttttagaaatgccaagttgtggccagatgcaatggctcacgcctataatcccagcactatggaaggcttaggtgggcggatcacttggggtcaagagttcaagaccagcctggccaacatggcgaaaccctgtctctactaaaagtataaaaaaattagccaggtgtggtggtgtgcacctgtaatcctagctacttactcgggaggctgaggccggagaatcgcttgaacccaggaggtggagcttgcagtgagccaagattactccactgcattccagcctgggcaacagaacaagactgtctcaaaaaaaaaaaaaaaaaaaaagcaaagttgtatggataagcttttcttcccaagctaaaaagttgatgtataaaaatagcaattcaaggccaggtgtagtggcttacacctgtaatgccagcactttgggaggccaaagtgtacagatcacttgagcccaggagttcaagaccagctggggcaacacagtgaaaccccacctctacaaagaaatcagccaggcttggtgacttacacctgtggtcccaactactcaggaggctgaggtgagaggatttcttgagcctggaaagtcaaggctgaagtgagctgtgattgcaccactgcactccagcctgagcaacagagtgagaccctgtctcaaaaaattaaaaaaaaaaaaaaaaaaaagtcagtgcaatcttcatgcaatttaatattgctagtgatgacttttaaccagttctacttactgtctttatagatggatgaatacagtaaaattccccatttttcttttccactgtttgttcttctcatataatctggtatagtaaagttgaatctctctaaagtcagatttactcaggttgtcttatacattagtttcaaattaaatttcttagagcataaatgtctacagccttctgtctcttgtatttttagcaagcgacatgtatttacttttgatctaattgccagcgacaattgacataaaagtaatgcttcaggtttcttagcattttatggtggaaaggccagtactatgataatgaagttaacacttgataataatagagaacagtgtcctacttggttttcccatcattctttctctcctctcttattgtctgtgttcaaatagtttaattaactcactctgaatgcacagctgtatcagctttctgtggtccaattttggaactatatctgtttattctactccctggaatcacaccaatacaattcaacatgtaaccagatttaatgcttgccatcttactgtctcaatttttagtgcttggtagtcattccattactctccaaatactgtactaaaatttttaagtgataaatttctaaccaaaaacttatttacaaatggatttctacttgagatttacaatggattttgagcacctcccccaaaagaaataaaaaacatccaacatggtatactaacttgatattattgcttcttaatttttgcaaagaggaaaagaatcagaatttgcataatttagccccacattgagaataatcaatacagtgagagaagaatttttattgcttaaaagaaaaacaggctaaatgtcctttttttttttccttcaagtgtaaggaatctgagaaaaacagattttaaaaccaatagaaggaatggttatgatccagcagcaactgctgcatgtgggtgaagaaaagaacccagcattatttgtacaaatccataagggatgcagtgggaacagaaagaaacaaggaagtataggaaatagagaagaagggcactcagtgaagatgtaggcctcaaaaaatgttccatctaagcactgactgattccagtaccttaaggtgatctgctttaagctataaatcttctgagtggtttatgctctcaatgcttttttttcagaaggctgtgagaggaggaaaaatatattattttcagtctgccccctcttaagactttatggaattttaagcaggcttctcctagagttaaattcctgattcaaccaccccagagtctatttggctatctgtctctctctctctctcttttttttttttcctagcttgcccagaaagattaaagtaaaggtattctttctttttcttttttctttttaatctcctacgttatgcctggtaatgtggcagatatcttaggttcattacctctcagttatgcattaacagcacctccatccttgagctgattagctcagttaactgctgcaggctactgacgaggcttatcaaaggtcctaggtttgagagctatgcatgttggctagatgacaggcaatgtagatgatagtcatgtaacatagtgtatgactaaggctttaactttggtgtcaaaaagaccttttgggtagctgggtgcaggggcatgttcctgtagtcccagctacttgggaggttgagtcaggaggacttcttgagcccaggagttcatagccagcctggcaacatagtgagacccaatctcttaaaacaaaagcctatagggtctgtcattattatagggcctgtgtgtgttacttagtctttcttggtttactcaatttataaaacggatatagtaacacccagtttctttgtgaggcttaagaaatataaaaaatgctaaatgatggctgggcactgtggctcacgcctgtcatcctagcactttgagaggccgaggcaggtggatcacctgaggtcaggagtttgagaccagcctagccaacatggtaaaaccccatctctactaaaaatacaaaaattagccaagtgtggtggcaggcgcttgtaatcccagttactcgggaggctgaggcaggagaatcgcttgaactcagtgggcagaggttgcagtgagccgagatcatgccacttcactccagcctgggcaaaagagcgagactccatctcaaaaaaaaaaaaaaaaaatatatatatatatatatatatatgtgtgtgtgtgtgtgtgtgtgtgtgtgtgtgtgtgtgtgtatatatatgtatatatatatgtatgtatgtgttcagtgcttaggtcagtgctgcagcatgcattttgtgctcaattaaaggagatggtcatcgtagttgtttgtgttaccctattacaaaacataaacaattcaagttctgagtaagaggtttaagtaaattgctcataaaattatatagctagtatttggcagagaaagttttcaaatgcaagcgtgtttaatttttttctttttttttttttcagacagtttcactgagctaatttttgtatttttagtagagacagggtttcaccatgttgatcaggctggtctcaaactctcaaactcctgacctcaggtgatccacctgcctcagcctcccaaagtgctgggattatgggattacaggcgtgagctaccatgcccagccaagcctgtttaatttctttctttctttcgtttttttgttgagatggagtttcgctcctgtcacccaggctggagtacaatgccgcgatcttggctcactgcagcctcagcctcctgggttcaagcgattctcctgcctcagcctcccgagtagctgggattataggcatgagccactgtgcctggctaatgtttttgtatttttagtagagatggggttccaccatgttggccaggctggtctcaaactcccgacctcaggtgacctacttgcctcagcttcccaaagtgctgggattacaggtgtaagccaccgcacccagccagcctgtttaatttctaaaccacctcaaataaagtatcaaagagaaactgctgttcaaataattgtgctcgaagaatatggtttttctcttctttaaaacttgattttattcttatatccaagctgcttatataaatagattcttgaaatattttgggacactaaaatagtccttcctgatcttacaaatttcttctctcctaaaatttatgtataaattggttgtttgaaactcagaatggatattcccttaggaagtggtggttgtgttctcaggccaattcataaaagcttctctagcctgtctcttctccctttctagtgcttaatgtttagttcagtggttttcagatggacagtatatcaaaactgcctgagtagctttgtaaagataaaggtacttgaacaaaaaaaaaatgagaaagaatgagtaagacctcgtgtatgatagcgcagcaggatgactatagtcaataataattaattgtacatttaaaaataactaaaagagtataattgggctgggtgcagtggctcacatctgtaatcccagcactttgggaggctgaggaggtcagatcacttgagcccagggtttcaagaccagcctggtcaacatagcgagaccctgtctttacaaaaaatacaaaaaattagccaggtatggtggcgggtgcttgtagtcccagctacaggctaagaggtgggactatcacttgagcccaggaggtcgaggctacagtgagcggcactgcacttcagccgcagccacagagcgagaccctgcctcaaaaaaaaaaaaaaaaaaaaaaaggagtgtaactggattctttgtaacacaaaggatcaatgcttgaggggatcgctaccccattttacctgatttgattatgacacattacatgccagtttcaaactatctcttgtaccccatatatagattaaattactatgtatccacaaatattaagattaaaaaaaagataaaggtgactgatcatacctcagatcttctgaatcagaattttagggtgaatgtgctcgatccatcccagcagaagcctgaggcaggggaggcatgatgtagtaaaggtactagaagaagtcctgtgtggctggagcagagaccggttgtctttaaactcttgattgtgatccttgtgaatgaaagtcatatgagccgataccaccaatatatgtatattcatttttaaataaattagccacctgtactacaataagcacaaatattttttaaaagatgaaataaaaatagtccttcctgactattttcatattctaaaaacagaacatgaaattctaataatcaccttttgctttctgtacctatttggatagttttatgtactttctgggatggacaaaccacacttttgcaaaatataggcaaagagagtgaagggaaggtagatagagactagattctgtaggaccagcagagccaagtatttctctatcctaagtgcaataggaagcaattggaaaatgttaggaaggaaaatgatgtcagatttgcatcctggaaaaaattactttggctgcccaatagcaaaaagatttagtacagcaactatgaacatggggagtccactttggaatttatggcactagttctgatgaaaggtgattatgccttgaattgggcattgccagtgaagtttaaaagaaaaacaagatagatatttttgaggcgtacagtatagaatctagtgatggattgcctgagcattggttgggggagcagacaatggtgacttgtgggtttctggcttgagcttctggatggaagatgaacagtgggagaagaacaaattgggggtagaaggtggggtattagtccaggtttaaatatcttgaatgttaaccatccaaatgatgataggaagttcacaattggatatgcaggctaagcttagtagaagttctgggcagaaaactataaatttaggagttgtcaacacatagtacagaaattcctctacctccagatattatttattgataggaaatatctaaagcagaagtgccaaggagttccacaaaaatattatacaagattagacttacaggactgaagatgaggaattaaaaatgaacaggtaagcagattctataaaatgcaagtctcccaaaattgctacagcattgggaccacagcttatactagaatgtggcaaataaagtacaaatcagtatttcagaagctctcaaagatactttgatgagcatgctacattctggagtaagccacaaacattggaaagtggctcatgtcatataagtattcatgaataaaggtccaggtacatgtcacaagtgtgcacaccactaggattgagtaattgggaaagctagacatgtcagatgagattaaaacaagtacagcaccatagattgtatgttagtatgaattcaggaggagaatgcctgggaatttgatgtctgtaagaagccttggaaattatgttagagttgcaagagagaagtatgtcctttgtccccacccccttaaaccattatgttccttaagtattagaatacaactaataatcatttacaggctctaacattctctgaaggtttcctcctgcacccaagacacatggggcaaaatatcattgtttaatatgttccctctcctcctagtgctaaaagcttaaaaggagtcaaagtgacttcttttgctgaccactatgaagaggattaagtgaagcctatagggcgtgttcctcctcttgatggatgccttctcctgattccttttcatctgtttcttctcgagtgcattatactactgcaaactgttagaattttggttgccactgatccactttatgtccagatcttgataagtccttgcaaaaataactgtgactctgacttggaaactctcagtaacccccaaatttccaaggaaagtgatactatattacatttctattttttctctgtccattgattaatatattaaatgagataatttatattcatcctaagaaactgtctgaagtgagcaagagtagcacataatggctagcacctttggcctattaattttctaggcacctgaactgagcaccaggaatcttcacttctgaaaatgttaacttgggtcatatcagcctttaaaaaagaaaaacacagtgatgtactttaccagtatttgcatccataaattaatatttttgtatctttcatttctgaattacagaagcagattcatcaaaccctgaatgatagctcttacaagtgactggcccaatgttaaaactgagcacaggagaaatgctctgtgttttaactgggcaaggaagcttgcataaaccagtcatcatgaaaatcctcctcactgaggtgcttctccctctccaaccctctgtcccacaaatttcttcttgatcatctttgtaccttttataaatatctgttattgcgcttatgaaactagatgataactagacacatatttggcactacgtctagactgtcagcttcttgagcagctttactttaatcatctggtcccaggcagtagagcaaagtggttaaagagggcaggctctggaggccaactggatttcatttctgtatgatcttgggcaagttacctatcctcaacttatttgtaaaatccaaataatacttccctcatggagttgctggcaggattaaatatagatttttctaaattaataggcttaaaactgttaggaaattttttgacttgaaggaattacatacttagtggcaattactgctaaccaataacaaagcagagggaagtggacatctgaatacatcaatgcagtgctaaaaaccttgcacactggtccaggcctctcttcttgtctttattgatagtttagctcagaggcttttagtatgaatcccacatcttctcaagcatgtacccctcaaacctaccagcccccaacatccacacctggtttagaaaggtttgtaggcatcctgtttgtcacagtgacaggcagccgctactgacatttaataggtgaaatcataaatgggcccagggatgccatgggctcagaaatggagagcggagtctacaccaaaaattattccacccaaaatgccaataatatcttaccttgagaaacactggtagtgcccagggtcttttctctactaaaatgcaaaaccaacttttcacaaaattaatatactatttcataaagtcagaatatgccaaagatcatgccatatatattacagagcatagatcaacttgaaaaatctttacgtatgtattctgttatttctcttttctgtgtgtaagttcttttcaagttactacagtgagtttcaaatttgttatttaagagttctattattctgttcattatgatccgaagtttaagatctgcggtgttgaaaagcactcctaaatatacaaagcccttgaactcctaaataaacaaagcccttgaactcctaaatgtacaaagatcttgtttgggccaggcctggtggctcacacctgtaatcccagcactttgggaggctgaggtgggaagattgcttgagccttggattttgagaccagcctgggcaacatagtgagaccctggctctaccaaaaaaaaaaaaaaaaaaaaaaaaagctaggcatggtggtgtgcccctatagtcccagctactcaggaagctaaggtgggaggatcacctgagtccaggaatttggggctgcagtgtgctgtgattgcgccactgcactccagcctgagcaacagaacaagaccctgtctcttaaaaaaaaaaatgatgattgagtttgataatcaggaaacttaaccaaatcttatatgtaagcaaataaatatgtttttatttgtttgttttattttgagacagggtctcactctgtcacctaggctggagtgcagtggcatgattttacctcattgcaacccagcctcccaggctcaggtgatcctcccacctcagcctcccaagtagctgggtctacaggcatgtgccacgatgctcagctaatttttgtatgttttgtaaacacaggttttcaccattttgtccaggctggtcttgaactcctgaactcaagtgatccacccaccttgacttcccacagggctgggattataggcatgagccaccacacctggccaaaataagttttattagaaataactcactttgggaggctgaggagggcagatcacttgaggttaggagttcaagagcagcctggccaacatggggaaactccatctcaaataaaatacaaaaattagctaggcatgggtggcatgcaaaaaaaaaaaaaaaaagaactaatgcatgtgaaattcaaatattagtaagtattcaaaataagatatgaaagtaagaatacaaaatagggtgatatcactggttgatatgattagtgagatgaacattattaaggcaaattcttccgataattattgttatacaacatgattaatatatattcagtctgaaagagtcatatatacaaatatgaaataaacacctcaaatgagaagaagagagaaaacatggagaatgaagaaagttgggtgtattcttttcagtcttcccctcccatatctccgtctgaggccagcatggctaatattgagaaagagtaaggcaaatgagtaattattgtgctctgtcttttactgttattgaaggtcactgtttaacactccctcgccattcccctaaccactcccctttgccttaaattcattaagctgtattctttgtatttcctgataacagctgacaaggacccactctcatctgtaatgacaggtgagggtattgatgataagtagagttaataaagcttctccagtgatttagaattataacgctctgagtattatcatcaggggaatagatgaaaaagcccatttcattttgtgcagtgtccttcaaactgctggttatgaaatcattttagagggtctgtgaaatcactgtggaatacgatgaaacgtaatagaaagtatcagcagacactgtgggagatcggtcagagcggtggggaaaaactatagggaaaggacgcaaaccttctgaaaggtcagaaggttctgcagagccccaggggagaatagctgaaggcagctgttctgtaaccctgaggcattgggcaaggagtaggtacaagggagtgtaggggaatttatcttaaacaaacttgtttacttatgttgaccaggaactgacctttgatcatccgtggggacggtccccctgaaaggggaacaataaatgttaattacctaagaggtttttaaatttctttctccagaaagaaaaatttcaagcgtctgaatcccattcagtattctctaaaataaaatcaagtttgtcctgaaagatggtttaaaaactgaaaatctattttctttgattacctcataaataacaagagtttcatatcagctctcctgtctcttcctcctccactcttttcccctctttcacattgtgccaatcacacaggtggatgctcagtatcaccccacagcacaagataaataagcttggaaggtttcctagcaacatattgttctgggaacctgctctgtttccctgaacaagatgaagccaaatatcctagaatctcagccagatgggaaaggattagcttattgagagtgttattgccttttttaaaaaaatgtttcactttgaaatgaacctcttaatataagtagcaaaagtgacttttaaaaggacatgtaaaaatatccctttaaaaggacatttttttctcttacatgtaaaaaaaaattgataatagtttgaagtttaaaaatatggtttcagaattctctaggcacaagcttccagtatgtaattcagtcactggtgagtggatccattttagaaccatgtagaaaatacttccacatggaactaattctcagcctggtgtccagtggtatggtattcctgctgtaaaaatactgaaatacttccgatctggtgggaaaatggctcctggagtaggctctctcctcacaatacctttagctgctccccttggcccttgtttctgctcctagggaaacattggagacaccttgttactgcttaaaaccctgaagcttcccctttttctatagctccagggctattttagtgctagtgatttgcaacttcatcttcagagtctatttttggttttctcagtgtatgattaatgtatatagagaaaataaaagaaattgagactgctatcaaagccaagaaaaataatgttgtcgttttgttaacacatgattgtgtatatttcccttgtttatctaatgatctgtgaggctacacagttggcaggtggtgctttcctttctattgcactctagttggtcacagtatacttgttagaggtctctggagatggagtaataaaggattcgtgtttctcataacaatattcagcagtggctttgcaattcagttacaccctggaaaatgtcctcactccttgtttggctggggagacattcccccatcagccagatgaatattctcataatgtggttgttgactggtttctatcatctatcaggtttggactgagtttgtgaaacttcccaattgtggtgagaagcagataattctagtacttcatagtgttcctggataagaagaacaaagtaattagaataagatggggaatgacacctggagtctttgttttttatgtaacaaattatctggccagatgccagagaattagtactgtcctcattttaatgaaaataaggaaattgtgagataattttatattcatgctagatgctttccattctcttttgctctctcactcatatgtatatgttttctaaataccatattttaaactcaacaaggaacaatctgttgagggcctagtatgagccaaatactgctaggtattatggcagatactgagggcaacacatcatccttgccttctcagagtacgcaagaagtttgcaacatagcacgtttgtaatcttaaaccaaacaaaaacattaaggaaaggtgttgctgtgtaaaggaatcataggctaggcacagtggctcaggcctgtaatcccaatgctttgggaggctgaggaaggaggatcgcttcagcccaggagtttgagaccagcctaggcaacatagccagaccccatctctacaaaagttaaaataaaataatataagtaagggaattctataactttgattgtccaaagaaaggctaaaagtagatttaatatgtattatggaacagaataagttctaatacgttaattttgattgaatacttattttaaaaaaaattttaaaaatgtccataaaccaggcattgttttagatacctctctgttaactcatttaattctcctgacaccattatgaggtagaaattttgtttacctgctattttatagatgaagaaactgaggctaagagagtttttttgtttgtttgttttaaaagacagggtctcattctgttgcccaggctggagtaagtggccgtcatagtgcactgcagcctggaacttgtgcgctcaagcaattcttctgtctcaacctcccaagtagctgggactatagatgtgcaccactgtcccctaagagaggttaaatatctgtttactgagggcttttatactacgctgtgcttatttgtttatttttaaaattctaagagtccataggaatctagtcttttttcagaaaatagtaaactactgtcttttgtggatgacataattttagcaagaaataaatgggttgtttagatgactttctattatctcatacagcataatgattctatatttgagttttcattgtcaaacactaaaacctcctttgttttcagtgtactaactccattttagaatatttttctcttctcttctttttttttttttttgagactgagtctcgctctatcacccaggctggagtgcagtggtacaatcttggttcaccgcaacctcagcttcccaggttcaagccaggctcatgcctcagcctccagagtagctgggattacagatgcccaccaccatgccccgctaatttttgtaattttagtagagaccgggtttcaccatgttggccaggctggtctcgaactcctgacctcaagtgatccgcccacctcagcctcccaaagtgctgggattacaggcatgagccaccacgcccaggccattttagaatatttcttgtagctcaattttttacttatataaaataataattttcattttcaacataatagaaggatatgagtgaattatatttaagaaagttaaaattaatagcactattaaatacattaacaagagaaggttgtgacatcagcaatattatttataacagaggtggacaaactgtagcctgtttctgtaaattaagttttcttggaacacagccaggctcatttgtttaggtatcacccatggcaggttttgtataataatgacagagttgaatctttgcaacttagactatatggcccacaaggcctaaaatatatactgtctggacctttacaggaaaagtttgccaacctctactctggaatctctatttttctcctaactttgagttgagcatgttcccttagaatgccagaaatttaactagcaaacacacctgaattttttttcataaatggtgtccttgtctaacatggttttcctcaaatccctgcaggtaccaaccaagaagctgaagaaatatgagaaagaatatcagacaatgcgagagagtcagctgcaacaggaagacccaatggatagatacaaggtatgagaaatatgttgcacctatcaaagtaccttcttttttgttttaaatgagactgagtcttgccgtgttgcccaggctggtcttgaacacctggcctcaagcaatcctcccactccagtctcccaagtagctgggattacaggcacgagccaccattcccagcaaagtacctttttttttttttttttttttttcttaaagcagcagttgtggcaagttcaattccctctgttcttccttgattgatttagatgctctctgatcatgctaactgtccaggtatgttttcatttcaggagactcccaaatagccaaccataatatttcttttctttcagtttgtatatttgtaggtaactccagctgttgcatttatactgggaatcttcataagaagctgagagaaagagaggggaaaaagaaagtggctttctactttcaaaaatgaaacaaaaaggaaaaatggcaaagtactgttttagctgtgcatgtcatatccacaaagacttttagcaggtgaactgttccaagactgacacaaggatgtttcaaacttgcctctgtctgtagaaaatgttaaaaataccaactcacttggaaggaaaaataaaaatcacaaaggtatattgagcacagtagtggtgtttgttgcaacatttatttccacaaatgaatttatgaacaacagtgatatttgacttaaagtatgaagtttcagaatcaaaataatttcattttaatacgttcgttaattgtgaatctcttcaatggtaattagcaacactgttcccaggatgcaaagttgggaaacacttatttccaacttatttttttccaagtaaaatattatctctcttcaacatgctttaacttttcagactcacacagatacgtaacagctccttctccctccatatcaatacactaagataaaagaatactgtattttcagcactgagcagcagtgccaaaatctcctgccaagaaatggactgtgtggcattattaattaaatcacccacattgggatgacttccacttttgtaactagagttatctttatgtggtcagagctggacataggcagcatagtcacacagaacatcttatctctgttgctgaattgaatagcatgggatgtgtgcagaggaacatggtgggagtatgtaggttttgtagtcagacagacctgaactcaaatcttgctcattttttagagcacaggatttggactccaaattgagggttttaatccccatgccaccattcagcatcttcgactagttattgaacctcttcctcatctataaaagatatagtgtttctgattccttgatggattgttacaaggatgagggatgctgtatgttaaggactcagctcatagttgtgttcaataaatggctgttattttatgaagcctactactacagattatgcaattattactagaataatgccaccttatgtgggtcttcccctctagtcccttattgattgttcttatttctctcaagtattgccaaccaataatctccccttgcttatagaagtggttcaagatctgattataaaatcccacatacttctatagcagataactattaacagataatgtttgaagctaattttcaccaccaacatcccctcaataaaaccagcttttaatgtaaatcacatagcatgctgctttagaaaggcttgaaggtagtaattataaactattattaagcatccaaaatgaaggtctccttttgctaatatcattcagattttcttattactacaattattatgaataaattctgtgaagagtgctttaaaataagagagaaatggaagaccaaacttgtacatttaaaatcaggctggaattgaacttgttattgtgtcttaaatccttttttgtgccaaagcaggtatgtatacattaatagtaagatgtacattatttttaaagtacttataacatgtaagattatcaatatgtatagtttttattgagagatcaaagtaggattaaacttcttgttttgaaagcaggcattactttttaagttcaagtattgttgattcttatttacacatatcggataccctctattgctatttcttttagattattgtgataacttgtcagtacattcatctaatgtctctatactcttaataatgtctaggcatttgtcctggtaatacacttggtgaatttatagttcttagattataattacatcttcaaggtggcagtcaacaacataagtttctaaccatcaacatatttggtttgtaagatgatcaatatgcagtttaagaagccatattataattatcttaattaaagtagcaaagttagaaaataccttttacatcttctaaatttaatcctatgaagaataagatctctgtcctgggaatgagcactttgtaattcatagatcttggactgggaacccagttaatgtaaactcttaaaagactgacttgggaagatctttgagggcattgagtgagaacttgcaccagttcagtaacaacccctcctcaacattagaatctatattgcttaaaaagtcatttccacaccctagcttgccatatgacaagagagttagaaggttgtgggaaatttattttttaaagcccacatatgttatataataagatattttaagaggtatttcagttcagtgctatttcttttggacatggtggcatatgtaaaagggctatcacagggaacctagaggtgggaatacagatccagcaatgtgaggtagctctcaacagtcatacttcttgctacatctatgtaaacatgtgttttatgtctatttttatgacatatgcagatatcttcatggttaggttatatcgctgtagtcacctttattcaacacttaaatctcaaccacaaagagatgaaataatgttagtataaatttaaattttaaaactcgacatatcttgaaaatcttctggaattaggaagtagtgatgattgcacaactttgtgaatatactaaaatcattacattgcacattttaaaaacatgaattttatggtatgtgaattacatctccaaagaaaaaaaaaagcagaatattccaggaggattgtcatttagcctacccttttcctttcatgaaccctaaatcacaccagaggtacctgtttagaagcaggagggagagcttcctgttgaaattagagctaattagtgactattgatcttatatgtgtccatatttgcagaataaaagccaacacagtgggtggtacattaatttttagtgatgcccattaatttccaggtagaacatatgttgtacattatatgtatacacacatataaacatatataagtaggtaatacacacacatatatgcactgcctgtgctacctggtcttggcatcagtttatattttaaactcagtgaacaccataatgactgctttatagcctttactctttctgtttttcttcatgactagattccaagagacagaaaggaaacttttttgaaagaacaatgtagaatgtttatttcaaatctcttttatcctctttcttaacttgcacctgaccaggtttgtgtaaaattctttgtctactctaacattttggtttgtaaatttagtgattgatttctaatgaagtgaaattaggataaagatttgactgtagaataagcatgttttcatttttatacaggttcccagaagacacacatttatcaatatgtgtagctgttttagtatattttagaaactagtaactaagcccttaataagcaaagttaccaatttcagaaattaaaatactttctatcttaaagagatgaattgtttctgttgtgaggaaagttttctagtgatggtatcagttgctggtactttttggagatctgtagccttcatctacctttggagaacgatatgcttttctggtttaattaaataactatttgcacaaatgtgagttaaggcttaaaaacacagctaattggccgggcatggtggctcttgcctgtaatcccagcactttgggaggccgaggtgggtggatcacttgaggtcaggagttccagaccagcctggccaacatggtgaaatgctgcttctactaaaaaatataaaaattagctgggtgtgctggcaagcacctgtagtcccagctactcgagaggctgaggcatgagaatcgcttgagcctgggagggggaggttgcagtgagccaagatcatgccactgcactccagcgtgggcaatagagccagactctgtctcaaaaaaaaaaaaaaaaaaaaaaaagaaacgaccaggtgcagcagctcacgcctgtaatcccagcactttgggaggcagaggtgggcagatcacaaggtcaggagaatcgagaccatcctggctaacatggtgaaaccccatctctactaaaaaataaataaataaaaatataaaaaaaaattagccaggcgtggtggtgggcacctgtagtcccagctacttgggaggctgaggcaggagaatggtgtgaacccaagaggcggagtttacagtgagccaggatcacgccactgcgctccagcctgggcgacagagtgagactccgtctcaaaaaataaaaataaaaatacaccccccccccacacacacacacagctagttaattaaattcagtgaatctcccaaagcataataaaggttacctgttctagatgggaaaatactaaaagaatctggaatgcttaaactctcttgggtttgggacacagacattattataaatacataatttctaattgaagtgtcttatccatgttcagtacaattaaatttagaatgtttaacctcattcttgagattaaacaaagtaatttttaaaatcaaaatgtaatttaaacaaagaaaatgattcctctatgtttccacagagttttttcttgcacatactggtttttgtagagcaattgctcctacatgtaatttcaaattaagctattatgcatagtaaaaataatacaaatgaaatatttgaaataaagcttaattgtacttttttgccatccttaaatatctaatgcaatagtttagagtaattttcacatttcttttaaacttgacaaataaaagtttaaattagtatacatttcttacctataaaaaagagggagtagactttttaaaaaaactgttggaccctttcttactcaggggagtcaagataagtgaatccatctttgaaaaatgtttttctggctgggtgtggtggctcacacctgtaatcccagcactttgggaggccaaggcaggtggatcacttgaggtcaggagttcaagaccaacctggccaacatggtaaaaccctgtctctactaaaaatacaaaaattagctgggtgtggtggcacataacctgtagtcccagctactcagtaggctgaggcaggagaacctcttgaacctgggaggcagaggttgcagtgggcagagatcgtgccactggactcctgcctgggtgacagagcaagactccgtctcaaaaaaaaaaaaaattttttttctgccatagcaaataaacttacattttattattttttcatatcccaaaaactgtgttggcttttggaaatagtatgttatgaaataatgtgcttttaaggaatagtaatagacacaaggatggtttatatatgcctatgataacttaatgataaacttcagaagtcttccactttctctttgagcttggataatccagagagttcattgttataggatggtgaagatgcaaaactaaatccttttggcttctcaagcaatatagctaataaggagtgggcgatttctaacaatgctggtctgctagagtcccttatacttaacccttgggggaagaatatgctttaggaacactaagaatttctagtatgtttactggtgatcttcagagttttcaagaaactttcattaatttttagaaagttttcttttctgtttaagtattactgagaaaattacctgacactaatatgtttctatatcatctagaatgcatctgctttttgaaaatttgatttgtgtactagagtagagcaaggatctgcagactgtggtttataggccaaatctggctcactgccagtttttgtaaaccaagttttattggaacacaaccacacctgtttatttatttatagtgtatggctggttttgtatgacatttgtagagttgagaaatttcaacatagaccatgcgacctgcaaagcctaatatagttactttctggcaatttacactagaagtttgctgacccctgtgcaagagtataacctaagatagttttttaagcgctgaaagaaatgcagtctgtttggccagctgtcatttatcactgacaagattttgtttttagtttgacatttaaaaatttgaaattttccactacaaagataaaattggatgtgatgagtaaaggagggaagcacaaaaccttcaaatatccatattttctttctcagatcttcattatggacaacatagatatttaaacattttatctgtaggcatttgaaaacttgaatatgatagctgtcaactcttttaaaagaggtatccaaaagaaaatatgtgagagttgagtgtgttgttgctaataaatttgcactgagtcttttaggaaaacattttctcctgacccttaaaagtctttaaaagcatgtgccaagaattcatcatagcagcagacaacacccaaaatattgagctagggtttataaagccgcctccctcctcgtcattttttcctttaaagcttagtttctttacttttaattaacagttcacatttctctggtttctcatcttgaaataaatgacgttcacaatcccttgaactgcttcacccagacttcagcccccaggtacacatgagatccaggatccatttttcttttgcattgccctgcccagcaatttcattcttttgtctgaagatgaactattttgcaagatttctgaccttgtcatataaggaagttccttccacccagctttaacaacacagtatcaacacctcacaccgtagttccttaatagtcccacatacagcattttagtcattcatgcaaactgtaaacagcaatgtggagagggaggagtttgaagatatgagtcttcctgagttgagacttgcccactggctacctcaagtatctttgttccattgaatgtttgcggtcacagagagaacttagagttatatgacactcaaaggaaaagcaaaagagcattaagaagtgtctgtttttgttattgccatttcataaatattttagtaggtgttcaatttcattggatattctttttttttaattgtctttgtacctatgattgaaaacagtagttggtctatgacttttgaggaggtaagttttttttttaatctatgtatgtctgtaacatcagtgtctgtctctttgaaaaatgcagtatcctcctcccaaaagttactaaccaaactttcccagctgtacatctcctatccataaggggtgaaactatgaggacagttgttatctgctttttgttcaaacggtgtcagttgtgtgagatggggagtatatgtttcagacagtgtgatgtgagttttaagagttatgtaagcagtgtctcctgtaatcttttctgaaaggcaagagggagccagtttgcctgttttgtttacaggctttgagcatttagcacatctgcttgtgcaaacttacagcatgtgaatttctctgggctgactgaggttattggggctgactttaagtctgtcttccatgggcaacccttgtcaacatttcaaaatgaaccaagcagggttactgccttttccaagaccatcaaaaccaaactctcttctccattctagtatacaggcaaactttttctagaattggtcagtattgaaaacagttttggctccttgagaagaactgtaaaagacagccacgttaatataagctctgtttagccctcagtaggtaagtgtgggcaagttctttgtagaaaatctccatctcagtagcagggtctcactgtagtgctcagtagcactcaccctgggttcatactttggaggatgatactgcatttttggccccgtagcttgctttcccacttgtctgtgagtgcagagcaggagtctgacacttcccactgtgctgcttgctttgcagacactaaattgaagcttcttgctaaagcaaaagccagtaggcgtgccctctaggctattttgctttgcagggactctgagacactcagtttctcccaaatcttttcccacccttgcccttgcccctttagctgtgtgtctgtaaggaagggtttcagttgcaacagtcattgtaatgagaagttactagtcagaatttcagctgaactcacacctctttcttatataacagataatccatcagacatttatctctaatcaacagtgaagtagctacctggtatgatttctaaatacttgaacaaagtacttttccatgaacatcctatgactttacttggaggttactttaactcaattctaagcatgtaattgtaacctgaaaaactggtagtggcaacattttcacttgtgccaaatgaatgtaatgtacataatagtcgagggagctttttgtactttggggttatacaagtacaatttcaatagcaataggatacttaactcaggaatacctattgaagtagtcttatcttagtttcttgaagatatttatcaagaaatgagaaaaatctcttccctggctaagcagcctgcattgtgaaatatgtcatgttgaaattgtgctggtattgttactctttcctggctgggaggaaatttattgaaaaagcttctcaaatctttttttttaatctaagtttcctatatgttttttttccatgaaaaggagtaatagatatatcagaaataaaggctaactctccagcccctgctagaaattgtgttgcttaggcaaagattcaaagatttcattgtagaagctctggctttttagaaatttgttttttagtctccacatttattatgcttctgtgggagggtgtaacttctgtagattgaggggaacagacagaatctgatgagtacaagttgcctctacaagagcattcacagtcttctcaggaacatctagggaaagagttcctcacaaggcaccacttctgaggggttacattatatcttggtcaaaaaggaggatccaatatggttttgtgtagaatatgaccttctaacagaagtggacttaaatttttttttctcattttggcatcttatcccttccaatggaattaaaattctgaattcctttttttcttaataaaactattttttaaatcctattacaaatatatattcattgtagaaaacttgaaaacatttttaaaagaacaaggacaacaataaagaaaattcactacctacagttaatattggttgtttatattgttacaatgagattctccaattatttattggggtttttttcccccctacaaggaaggcagcgtaagcatttcctgttattatattttctttctttcttttttttttttttgacacaggttctcactctgtcacccaggctagagtgcagtggcatgatcatagttcactgcagccttgacttcctgggttcaagtgattctccaacctcagcctccccagtagctgggatcatgtgtgcacaccacaccacccagctaatttttttttttttttttttttgagatggagtctcactaactctgtcacctaggctgaagtgcagtggtgcaattctggctcactgcaagctctgcctttcaggttcaagcaattctcctgcctcagcctcccgagtagctgagattacaggtgtgtatcaccacacccatctaatttttgtgttttgttttagtggagatgaggtttcaccatgttggccaggctggtcttgaactgacctcaagtggtccacccacctcagccacccaaagtgctgggattacagacatgagccactgtgcccagctgtacccagctaatttttaaaaatttttttgtagagatggggtattgccatgttgctgaggctggtcttgaattcctgggctcaagcaatcctccggtctcaggctcccaaagtattgagattacagtcatgagccactgcacccagccttctccagtattttaacactgagtagaattctattgtgaatttatttaaagtattaaagtgatttgggattgtttttatcttttttagtcgatatgtttttcaataatgttttaacattctccaactattcttatttttttccaaaaaaaaaaaaaaagacagaaatgggccctggtggctggtataatcaaggtgcggttttgtcctttaacttctctgacagccttccctgtttatggatcctctgcctctgtgaaagcctcagactttgcccttaccatgtgtttcttagcccttgttttaaaaaacaggaaaaagaaagaaattgtcttctctttcaatataacaaacaccaggttgttatatagaagatacaattaacttcacattacctggtatgctatgataaactatcttccaaaacatatatttgtcttctagttttttgtcactgctttgtctgagtttttgccacctttgcagaaaacactgttagacgtgtaaatctgaaaaacaggaaggtctcatgacattagtctttcctgtcagctctcttttgaatctcctataactgttaacagtagcaaagaaagcaattttgatactttggaatggaagacatgaaatagctattctgaaaatagttgtgaacataccaagttcatagtgtttagttaaggaaaggccttgcttcataagaattagtgacttggtttttttttttttctttctttttgtttgtttgtttgtttcgtttttttgtttgtttttttatcatgtaactttgtttcagatttttcaaggttgggagcagaaatcctcagtaatttattttacccagaatgttttaatctgaaattttttaaaaaacaaaaaaactagatatcttatgactgttgctctcacacaaaaataggtgttcagaaaagtaaatatattcttactcaaagaataaaaatgtcagctgttagcaaagtcatgaacccatgtgtcatgattcttgatttagagctcttaaatatactcaatatgaaccctgtcttagaaaaacaatttgaagaaatgtctggtggttttcccctgtttcattcctactgtgtcttgtggtttctcttgaggtcaagggtgagactaccgtgcatgtttcaaataaagaattgtttgtgtctgtgttctagatctatgtaaaaacctcacaggattgggggggatatgctcagaaagtttgttctttgtggcacattttttataatgaagttccatcttgagagtttaagggaccagtttcaccgggtagagaaccgcatctgcattgctagctaaactcactgttgtttcccagacagcaatcctgccttcctgtgccacttgcgccttctcctttttacacctttgaaagttcactttgttgcttgtttttcctcaccagttctgttcgtttctgtatgtccagacactaatgcccacctctggctattgttcttctgcagagggagaaccgaagattacaggaggccagcatgaggttggaacaagagaatgatgaccttgcccatgaactagtaacaagcaaaattgctctacggaatgacttggatcaggtaatccttagaaatgagactgtgatgacttcctcagggcaaagaccgatttgccctcatcaccgcccccacaaacttgctttgttcttgactttgttcttgaggaatggacaagtggcagggacagtctgttaattggagaccatggaaaacataagcctttgagaaaggtttgggtcatttctaaatagcatgtgtgacatactttctttatacctctaaactctgttatgtctttgttgatacctttcctgaaccaatggctgtcagcataattatctgagaacatcagtcaccaagaatatgcctgtactaatgccactctaacagtagatgccttactttttgttccagtaagaattattctccataataaatgtgaacttttacatgaagtacctacattaagagttggattgttagattgataggcatctgagtggctgagagccagactgcctgattgtgaatgctggcaccaccactgtgaaccatatgaccctggacagttcttaagctgtctataggtataaaaaggtgtctatctcatagagatgatataacaattaaataagtaaaacacttcgatagtatgtgttcattaaatgttagatgtagctgagagagctggcactaaagggaattcaaaaacaaaaacaaaaactgtgttgtttgggacacaggatatggaaggtagaaaaagctgcccagagaatggttttttaaaaagttgtggccctgttaaccacaaacctcattcagcccacccatttggaagctgtgagaagtggtatgagaaatatgtgactaggagagtcagaaccaaagaaggtagccggatctccattcaatcagggtcaattcagccttacctcagtggtcatatttttgtattcatgagactgttgagataagtcagtgctataatgaaagtcttggttctatgttaactttccaaatggtcttgattcacacttgattctgccattttgaatcttttatccattaataattttcttatgatggctgactaaatgaaacaatttttaaacagttggattcagtggggatgcagtgaaatgagctaaggagagtttcaaagttgtttggcaaatgtagttggtaatatgtgttaagacgttaaaaggtttaagcaataataaaattaaattttactatgtacccactatgtgccaagcactaaataaagcaatttataaacatcatctcatttaatctccctaatgactccaggaagcagttattattttaatcctccatttcatgaatgaggaaactatatagatgaggaaactagagatcctctgacttgtaaagctatcctaaaaaaaaaagatctgtttaaaaaaaatgtatatacaaggttgtttactgcagtgttacttataagaatgaaaaatagaaatattattttatctatgttcactagtaggggagaatgacagtttgactgtaaaatgtctttctggaataatttttgttaatgggaaaataatgataaagtatttttttaaaaaatacttttttttttctgtaaacagtaaacatttataatgtttgcatctaaatttcaagggctactggctggcattgggtcatcctatagggaaggggaccatagtatacctagatagggaagaagcccacaaggaaatacatcaaaatgttactgctaggtatctctgggtgataagattaaatataatttttatattcatctttatagttttttcccatttagaatttatagaaagaccctaaattacttaaccaccataggttaactaaaaatgagcattggaacttttaaaaatcagaaaaataatgaacattataatatgcatattatatatgaatataatactaaataatatatataactttaataatcagaaaaaaattattatcttaaaaatcatttcttcaccaagagaaccctttatgtgagtcagtctggagtgactgccattataggtattcctgaagtaattgattattgagtaccagggtagctcatgatgtgagtgctagaacagcccctgaagaaaaggttccatcagaccttcattcttcctctgccttctctcttccctccttgactctctttccctctcttttaagaaaagtaaatatgacctggaccctccctttgggagctttttatctagatgaaagaatctagatgaaagaataaaaactgctgtttcatgcatatttcctcctaacttctgattttgcagtttcctcctcattggggtttatttgcttaccaaaaagctgtccctgcagttgaagtgacctgccccaccagtcttctaggaagggccctagcctgagagtgaaaagtactggctttgcaggccttcacctagtttgcccagtactttcccattcccagttcatgaaaatcagatctcttaattaaaatagcaaaacactggcaaactttaaacaaatataaaagtagattgtatttaagacaatatgtaagcaaacaaacactaattaggaaattaggttctttgcaaaaataaatcatttcttactctgaccattttagtgctaatttcaggcttcctgggcaccaaaggctcttcagcttttccctctggcagagccttcctctcttgagaactcgccctctctcggattccttaaataaagatttctcagtgattagaagtgaaaaaaaggtgcaacatctccatttcagtttctgtttgctatctgctttcaggcctttcctgtccttccctatttgcaaggaacaaaagagaagagacatgattagtactgtcctgctgaggaccaggggtctaggttccctctcaccatagcaagttctgttagaccagaagctacatggactaagtggaaaattattttgttttattttaagttgaacaactggcctggttagttctttcagaaatcatttatcagagatcctcatttctgatattagggctgagtcttttctgaggttgttggttgattcatgattaaatcacacattgcaatgcttgtttctctcatacatatatagcagaagccttagattgcaattagaactttcagtatcaatgagacattataagatattggtaagtatttagacttgataatgacagtgtttcaatcttatcaaattatggtgaaggctgtctggtgcagtggctcacgcctgtaatcctagcactttgggaggccgaggcaggtggattgcctgagcttaggagttcgagaccagcctggggaacacggtgaaaccgagtctctattaaaaatacaaaaaattagccaggtgtggcggcatgcgcccgtaatcccagctactagggaggctgagacaggagaatctcttgaacctgggaggtggaggttgcagtgagccaagatcgcaccattgtactccagcctgggtgacagagcgagactctgtctcaaaaaaaaaaaaaaaaaaaaaaaaattatggtgaaggctttataatttgggctcaaaggtagaatttgaaaggctttataatttgggctcaaaggtagaatttgtgtttagcatttcattcattaacattaaaattaattcctacttaagtgaggtatagtggttggctgtacaaaaattcaaaagaccactgttagagggatactcaagttatttcagatctggccctactttgatgaacagaacaattgctcctacttttctgtttaacataagaggagaaactgtgaattaagcttcctggaaaactggactcttccctataggacccacaacaattgctgcagatgttgtatatggtaacagtagaaataagtgaagttgccttaatcttgacctaatgaagactgttcagcagaaaatgtgcaaataaaaataataggtcttcttagcataaacatttaggtgtttttgaaaaaaattcctcggggaagtgtttttcccccttttcttttctttttctttcatttcttttttttttttttttctttgagacagtctagccctgtagtccaggctggagtgcaatagtgcgatcttggctcactgcaacctctatctcctggtttcgagcaattctcctgcctctgtctcctgagtagctggaattacaggtgcccaaaaccatgcctggctgatttttgtatttttaatagagacggggtttcaccatgttggccaggctgatcccgaactcctggcttcaggtgacccacccacctcagcctcccaaagtgctgggattacaggcgtgagccaccgcgcctggccagcatttactttaaaacattttcataaaatgttaaaattttagatggctctccaagagaccaaactgaaaaaaaaacatttatttcagtatcatgatgaacattatgaaaggatcagtctgttcacaaagtggaaattgctgtgggtcctgtaagaggaaggcttagttgcagtcttctttattagcagggctcaaacattctggggtagaacttgaaccagtgggctgcagttacagggagagagttggttcagtttttaagaacactgaaatgagcagtacaattgttttttgttttttttttttttttttttttttttgagacggagtctcgctctgtcgcccaggctggaatgcagtggcaagatctcggctcactgcaagctccgcctcctggtttcacgccattctcctgcctcagcctcctgagtagctgggactacaggcacctgccaccatgcccggctaattttttttgtatttttagtagagacagggtttcaccgtgttagccaggatggcctcgatctcctgacctcgtgatcagcctgcctcggcctcccagggtgctgggattacagatgtgagccaccgcacccggctgtacagctgctctcaaagtgccactctgtgcctatctgtcagagactttggggagggtctccctgctttgtgagtaacctcagtcagtcatctggcttggggctctagaatggaagctttgtgcttccatggtttatttatttttctctttttgttttcttttaaaatgccgtactttatgccacatcctttcatgatgtacatcaggtgacttacaacttatgaaaacttgacttgcagtgttcatattgcattctcaaggtctacctctcattttagttgttaatttgctgttagattttcccccctaaaatctaatgcatcagagcaatttttagagtcttaaagacttttaagggactttttcgccttaactacccaacggtttcaaatgatctgcaaacaaagctctaaccactgggctatgagccatcaggagccagaagacagggcaagcagagcagctggaatgcagtttctctacagtcaccagcagactgtgctggcctggccatctggacatgcaggagatatggcagaaaacagacagaaggccgcttggccagtcctcagcagactgggctggcctggcccatctggacatgtgggagatatggcagaagacggacagaaggccacctggccagttttcaccattatttggataacattttgctgctgtcagccagggatagcttcttcacataatcacctctcctctgtgtctgggttctctctgctgaactcatcctgtggccttctgccatctccactgcatgcagtctgcatctgcaatgatttagccacacctcttcattcaccaagtacttagggagcacctattctgtacttggcattgggcttggtgcttgggatagagtgatgagcaaaagagatatagttcttgtctcctggagcttaaagcctagtgggcaagacaaataaatcccatgtgtaagttgtcattacagtcctattaagggaaatatgagagatttagataggggagctaacttagatgagggtgagtgggccagggctgagggcatgcttcattgccatgtgaacttgaagccgaggcctaaaaggtgagagcctgacgtgttaaatagacatcatcattctagaaatatgatcttttcttcctgggttcctggtccatatttccattttcttcatggctctctctatcatgggtttttggtcttgatttctccttactagactcactgccctgtgtgagtggccatgtgggcaggtttacctcagctagtctttgaatttgccacctaactgttgtcctcagaccaccctgtctgctcccctctctgagtcaacccccattctccaccagttggaagtttctgtgtgaggctctaccccttcatcagatccatctacacagagtgagtgctgctgtaacatctaaaaatctgtaagaagcatttagaaggaggatggactttgatgttattcaaatctgaattcagatcatgactctattagatgtgtgaccccagacagtttgttggatctttccaaacctcactgtcataatctgtaaaattattgttggtgtgtggattagaaataatgtgtgccaactagatggcacatagttggcattcagtgaaagcagccatcgcttggttgagctaggagggaaaataatgacttgcaataattttggaacagcaactgaagattgggtttggagaagatttccacacactttctttaccctctgtatgactgtgatgtatgactgtgatgcaccatgatttgcaggcagaagacaaggcagatgtgttgaataaagagctccttttgaccaaacagaggctggtggagactgaagaggagaagaggaagcaagaggaagagactgcccaggtaaaaggaataatatgtaggcttttctttacaaaggtatgttggtagggaattaacactataaaaaagaaggaaaattaaatttcttctaaatcaaaggtgatgttaaagcagtaatgtaagtagttgagtgtacttactcaacatttttgttcaacatttctgacattttttttttgaagggtgttaaaagaggaggcagtatttctacccttgaacagcttttaggaatttgcctttactgagatatttagcaagagtgttgagttttctctaagtttagtaacttggaattatgatccaagagctttgacaaatctgcaaattttgtgttgtatctccaagataattgacttctctgaagtagtttatgagcattgttaaaccgaaagcctacagagatctctgctgggagttgccacacagcccctgccgcaatcagtcacacttcattttcctgattcacaccttaagcagcatcagtattcctggctaagctttcaaacctatttcctgggggaatataaagaaacattttgggaaccagccttgaagttagcaccctacactcttcatgggagctgtaaggctaattagccagaaaatgccaccagtgcaaagcagtataggataggggcagagaggcctatgggcccaaggaattggagctttccgcttccccaaggaagaacatgctgcttcatcagtgttttctacccctgtcagtcccagccaggggcctgacacagattagattatgagtcagagtttcatcacaaacaattgaagtcttctgccaagagtgtgtttgaattttactaatgtagctaacttataaagtgaggaagcatctcaaatcgtgattagcttattttaatgagtttcattctgagacatcagtaatactaaacttaaagcacagcataaagcatttcaaggatctacatccaagcaaccagaaaaaaagttccactaaagttacatgtggaggaatgtgtcatttagcaccttccagactttataaaaagtgttccatggtttctttttccttggaatctgatttaatgagtctttggcatttacagcggcccaggatatatatttcttacctactcaaaaattttcaggggctgattacccagttttagattatttaggctccttaatgggttttgttttttctttacttcctgccatctttgggccacttaagctactctagatgaggcataaggctcttggcaagtaaatttaacccaggttctacctgctccgtggttccatagacatatatactagcctgtaagcaattgatacctaaaatgggaaggaatatgacacttgaatactcacctagtatgttgcaagaacaatgcaagatgctttgcacccttcctcccctccatgtgcatctgtgtgtgtgtaactgttttaatcattatggtacccttgtaaaatagggattattctcattttcagatgaggaaactatggcttagataaatttagtgacccttgctcaaagactctcagccagccaagtctgtcctaacatctatggggccttatcgtggaaggcgagaaggttattgtttatgtccttaaattatgtcagatagagaataaagatcaatataaacaactgagtgtagatcactataacttaccaattgcttttagaattttagaatctaacagatatgaagaaattcagaaatctaatgagtgctattataaattgcaataatttatgaactagcaattacagagtatacgccattaataatttgggatgctttagtgcagaacgcatctctttattctgattatgtacttaaagtttaagcagagttgttttttgtttgtttcattacttgtttgttcaacaacttgcagaatttaattctttcctttgtatctggtagcacctgagcttttccatcaccttaattttcccctatacctagaattctagagctgctgggccacaaaaataactgtggttataactatagcattcataatttaacatttcagtgactgtaacaggtacctgccattatgtgtcactttagctccttctaaagtcagtttctttagtccctgaatctcctgtccttctcaaaactcttatcttcccccgtcttttctaactctagtccccaaagcctcttgtttctgcctccagagaggtaacagcagtaaaggtagactataaataaggaggcctacaatgatttttttcagtaatttataacatcaagagtaacaaatttagcatgcagtattgccttgatgttttgttttagactcttataaggataaagatagcttctgaatggatacttatttagcaatatgtttagaagtagcaagcataagcaattttataatggtgttgttcatatgtctcatattttacagaaaagaaagtaaggtttctgcatctctggagatgattgactttttcagattatcaagatgcagcttccatgaagataatttatatagttaacattgttaccattgttactgactatgaatcagacagacttgaatatagatgtttgtgaaaatttaagattttggctaaatcctgatatttctcattctattctttctagctaaaagaagtcttcaggaaacagctagagaaggcagaatatgaaataaagaagactacagctatcattgctgagtataaacaggtaatgtacttctgtggcacatagagctagttatagtttgctgctataaaagtaatttttttttttttgcttgaggccaggagtttgagactagcctgagcaacatagcaggaccccatatctacaaggaaaaaaaattttttagttagccaggcacagtggcatgtgccggtagtcccagctacccgggaggctgaggcaggaggatcagttgtacccaggagtttgaggctgcagtgaactatgattgcaccactgtactccagcctgggcaacagagcaagaccctgtctctaaaaaaataaaaataaaaaagtaattattttgttgttgtttttctttgggggaagaaatatttttgtttttaaagtttccagaatagttttccagatttattaaatttggtgactcactgtctcctttgaagcagacactggttggacatacttataacttattacttatagcttattacttataactgataacttgggaggtctaactgaccaaaacaatctattggttgtttacagtgttgggtagatttagaggaatagaaaaaccttttgatgactactgagatcctgtttctgccttagtcagaagctaatttccagtagatcacacttggaacatttgcctctttgtgaagtttagttattgtattaaatggcagtagctaggggatcagtgtgccctttgctaccatggtacagaatgtggtaggcactctttttcctacatggctatgtggccttcccctctgcaggccaatgctagcaggaagctttctattgtgaaccttaaaatgcttttaacaaagggctcatcttcttgaggatgtttctggccccatcaccatagtggtctcagaaagccctctttcctggtatctactggtatcttcctgtccttcctgttggctggacatggcaaggactcctctcattgctgagaccctgagttatctgttcaaattccaggtttctagaattaattaaagtaccatatgccatcttttgatctaaagatttccctggggtcttctacttcacataggactctgaagtctgatacttactttttaaaaaaatgtgtttttttgcttataaattaaatttgtgttcttgtggaaaattagaatagtgcagagaagcacaaagaaaacaaatctccctcagtctttctagctaatcattgtaatatattgaatatgcattgttgctatacaaatgctttataaataaatttaaaatatatataaacaggatgaattgtattgtttatcctttttttttgtaactagctttagttcactaatacattatgaacatctttccataaggaatccgcatattcacggacgattgataaataaaactttagagctattttactcttctatgataatcaacatatgtttatttaatgcctgctctctgtgaggcttaatactttgacagacaaaaagatgaatgaattcaagttttcttctctagaagcttatcatataatgtggaggtaatacctacgtagaaataagaggaaaggaaacttattacatgtgggaaatgaaaccttttgagctgtgcttcaaaggcgatgtaagacttggatctgtagagataaagaagataaagaagaggatggaaatggtagaaaagagagaacaggatgtgcaaaggcatggaagtagattagtgaagagaaaaataattcatttggtaagagattccggtacaaaagagaagcaaagggacgttagggtccagatcaaggaaagtcttcagggctaggcttgggaccttggattttattttgtttgtggtaggatctttttgagcaggaaagtggcataatcaaagacatattattggcactaatctgtcccagtaagaaatgtggaaccaaggagacagaccgcgaataccagagtccaactgtaagaagaaccaggtccctgaactaaataactaacgaaaatagagaaaagggagacacaaaagacagttttttttgtttttttttttttgctagatgagaaaaccttgaaggtgatctgagatgccgaatgtgggcatctaggagaagaggtggtagacattaaccaatacaaggaacattaaagactatgtgctgtggaatttcccattgctacaaatgcatgtttttcattgccagattatgccatgggtggccaccaaatgcagcactcttcaaatagtaatcctggggactattcttgaatattatctggcaagcccttgaaataatgcaaaaggcaacagacccatctgtttgaagataaggatataagacacaatctaaatgcattctatagttggaattggctattactggctctatgcataatgttttggcttatttaaaagggtttaaggtttgcagaatctaccatggtgatctcttctttttaacatcagtcaataccgtcctactaatggttcctcaggcttggatctggagaaattggaatgaaactcaacaaactaaactcagcaagcaagccctcatcaccagagctatttttgagtagactgggtgggattttttaaatgtctgttttgataatagaggtagaccatatatgtttttatccaaaattatactttaaaatttcacatcccctgtttttccatcttttttttttttttttttttttttttttttgtgaggcaaggtcttgctctgtcacccaggctggaatgcagtggtctgaacacagctcactgcagccttgacctcctgggctcaagcgatcctcccacctttcatccacttttctaaaataaaagattcttatttcagacaatggatttgaacatccaatacttatttatctagattttttcctttgaaagcacctatttctaccatttctaatacttgttagcaccttatttcagaatcaataagaagaatatattttatttaatgtacacttactattggccaagtgctatgctaacccctttgcatacttttttttccacttgattgctatagcacagcacttttcaatcatgaggaaactgagtcttagaaagattaatgactttgcccaagctcacaaagctataaagaaatggagctggcctgccttaaactcacatttaactccagcagctaagtttttaatttctatgctatgttgccaaacctacttaataagagttttagtctgtattattttctggtcattttaactttgttttatccactctgccacctttttttaataccttaaattctggggtacacatgcagaacatgcagttttgttacataggtatacacgtgccgtggtggtttgctgaacccatcaacccgtcacctacattaggtatttctcctaatgttatgcctcccctagtcccctacccctccaccaggccgcggtgtgtgatgttcccctccctatgaccatgtgttctcattgttcaattcccacttatgagtgagaacatcactctgccacttcttaaggaaacttttgtgattgaaaacaggttctttctgtgacagtagaaaggagatatttctgtctagaattcttttcatcaagattttctcagcatactaacttgtacaaagtgaatactcagcaaagattctataggttaattccaaaagtgaggccaggaattcacttgaaccagtcacagaaggctagtgacagaaagaaaccaaatctactctccgtatgtttctactaattaaggtagagtgtgctttacatatggaacgctccagctttctgctgctcatttccgaaatgactggcatttgcagtgctattcatttgtaaaattccttctaggatcagatgtgctagcataacacatgaattgataagtagttatgtgtacatgctgcaagagttgttctgttttctagtaaaagactcttttctcatccttagatctgttcgcagttgagtaccaggctggagaaacagcaagcagccagcaaggaggagctggaagtggtaaaggtaaggagtgaaatcgtgctgtgataaaatttatttcaaagtcacacaggcttgtaagtacctgaaagaaccccaaacaccaccattttgtattaaaggatttattaataggaattatggagactaggatacctctcttctgaccaggtgtgattgtcttccctaccaggtgaaaggttatgatgctcccataaatcatatggactgtcagaggcagctaacatgaaaggaagtaggatttgacattgtcacaagaagccccagagcttgagatgagagtggtatgaacctgagaaccctcagcagcccacatctgactgagcctgcattgatgtggcttcagtatgggactcagtaggatcatcccatcactctctttataagtaaacaccatgggcaatatagaacttagctggaaaaacatgtgttgggtaactgattcttgcactaagtttttagaggtttatttttaaagaaaacctgtggcatttgtttacttgctgccccctggtggtaaaatgcattatgttgatgctctatttgaaaaaaacagattgcttattccatagaaacaacagtaaaccaatggattggtattcttaagaggcaatattgtcatagtcaacttttgggaccagtgttacagaaacctgacatcatcttatttgaatatgttcaggtttcatactagtaaataaatgtgtagtaagtaatttagcaatcttgaaaagtgatttaacctttttaagcttcattttgtgttctataaaatggagataacattacctgcctcaaaaaatcattctgaatgttaaataagataatgaatataaagtacatagtgtatataaagtgcttatattagtacctgacatacaagaccttgtattccaaaagtattttcttcttactcatgttacaaaatgtcaatgagagatttagtgagtataaggtttggtgttctccctctctgatgtgctaaaatttgatgtttgtatcttccctttctggtctacttttgcacttctttctagttagcacttaccactctttgtacattataggcatactgaccaagattcagttgatgaagttgaatggcataaaggggttaactctcctgaagtgaattttttttgtatttcttctaacaaaaaaaaaaaaaaaaaaaaagggatacatgtgcagaaggtgcaggtttgttacataggtatacgtgtgccatggtggtttgctgtgcctgttaacccatcctctaagttccctcccctcagtccccacccccaacaacaggccctggtgagtgttgttcccctcttctgtgtccatgtgttctcagtgctaaactgaaatctttatggaaataacaaaatgagaatttatattgattattcagcaaaggttttattgagcatatactatgtgcatagctattagactgccattttgttatagaaattacacatgaaaaggagcttaaaattttcctgtaggacaagttatgtatacatgcaaattaagaacttaggaagcagttcaagggagctaagttgggccaggtgtggtggctcacgcctgtaatcccaacactttgggaggctgaggtgggcagatcacctgaggtcaggcgttcaagaccagcctggccatcatggtgaaaccctgtctctgctaaaaataacaaaaattagccaggcatagtggctcacacctgtaatctcagctactctggaggctgaggcacaagaatcacttgaacccaggaggcagaggttgcagtgagccgacattgtgccactgtactccagcctgagcagcagagtgagattccatctcaaaaaaacaaaaaacaaacaaaaaaagtgctaagttggatcacaatgacaatcagcattgtagagaaaacaaaatcatgagaactatagaccaaaaaaggctttatggagattggactaaagcagggtggatagaaattagttagagagaagtgtttaaacagaacattatagaagaaatgatgtgagtgaagacgcaaacacaggaatgagtatttcagtgtctcattacagagactgatgtgattagaatatgtattaaggaacagaggaaaatattggctaagtaggtgagactacctaatgaaaggccatgacattcaggaagaggaatgtaaacttgtcttagccagaataaagaagaacaactaggctcacgcctgtcattccaacactttggggaggctgaggtgggcggatcacttgagtccaggagttcaacttggtgaaactcctggactgggaaacttggtgaaaccctgtctctacaaaaaatacaaaaattagccggatgtggtggcatgcacctgtagtcccagctcctcaggaggctgaagtgggaggatcgcttgagcccaggaggctgaagctgcagtgaactgtgagcatgccatggcactccagcctgggtgacagtaagagcctggtacaaaattaaaaaagaaaaagacagtaaagcttcttttttattgatgataaggtcgcaaacaggtaattcatttgatcaaggttacacagctagtagaaccaggatttaagcctggaagtcagactctaaagtcaataacattagctgttagactatactacctcccctttctctagtgcttcctcctatctcatttggtatgataaatagcttttggttttttcagtttcctgtaataaccttcttttgtcatgatcaccccccagttcatcctttacactataatcagaatgagtgttcccaaatataaagtgatatttgactatcactctgtgtatcaatgcagaattagattggccacatatagggaacccaaaatagcattggcttaaacataaaaggtgttgattattttacataaaagcagcctaggactagaaaggtatatctttggtgtcattagtaacccaagctaatcagtcattagtgacctacatcgtcatgtggacttctatcctcaaggtcacctaaaaaccaatccttcctttctttttttcttttttttttgagacggggtctcgccctgtcgcccaggctggagtgcaatggcacaatcttggctcactgcaacttctgcctcccaaattcaagctattctcctgcctcagcctcccaagtacatgggattacagtcacgcgcctccacacccggctaatttttgtatttttagtagaaaaatacaaaatacatggtttcaccatgttggccaggctggtctcgaactcctgacctcatgttctacccacctcggcctcccaaagtgctgggattaacgggcatgagccgccgtgcccagcacaaaaccaatcctttcaactagagctcccaccatcacacccatactctatggcagaattttagtccaaaaggagatgcaggatataaaggcctcattctcctgggtgagctctttctaagcagcctttttagaagctcccctctaaacttctgcttacatagcagctttgagggaatttagggagtgtcaccttttatctagacacactgccagctgaaataaactcagggtctgttagtaaggaagaaggagaaatggatattgggtgagaatcagcagtatccaccacattttagcaggtctgccagactgcagctctgtcaaacttattgctctatctttgacatgtagcaccaggctcggtagagtaaatgaatacattttctgtaggataaaatcagaattcagcaacatggtatttaaggacctttatgacctggccacagggatctctcatctcgctcattgttgaatcgctttctgcttaagccattttaaattctttgaagttatctgaaggtgctatgtctttgcacatggtggtgttctctttgctgaaatgtcatcctccctcttaagtgatcaatctatttcttcaggtggttcaacctaataaaattacttagccagcttggtaaacttttaatcatttaagactcagatcaaaactatttctttaacatttttagtcaacagtaaatacacaacaaatatttacaatatgcctatactgggctaattattctcagaggttcttaagagagtgacaagttttgtttttacatgtctaattaatattaatgaaaaggaatacgaagagtggtttatggatgggatgagaaggaagccagtgagtactgagaaggtgacccctagggatttggcctggaatggcaagagctcagacatgtcagaggaagaaatttttttttttttgagacggagtcttgctctgtcgccaggctggagtgcagtggcgcgatctcggcacactgcaagctccgcctcccgggttcacgccattcttctgcctcagccgcctgagtagctgggactataggtgcccgccaccatgcccagctaatttttgtatttttactagagacggggtttcaccatgttggccaggatggtctcgctctcttgacctcgtgatccacccaccttagcctcccaaagttgtggtattacaggcatgagccactgcacctggcccaagaggaagaaattaatggtcagctggacatgggatgaaagaggagctaatgaaaagatgatccaaagtcgtcaggcccaaatggtggagacatgcccagtggcacaaaagtgtggtggagagttgctttttgtgtgtgtgaagagaggaggatgggcacggtgatggacacattgagcttgtagcagtagggcatcaaagtagaaatagcatgtaatatcttttatctctattgaattatttttgaaaataagtaaacaacagtactattgtctggaaaacagttgctgttgtttagtgctgtgtgcccgattggcaatgcgggcatgtggtagagttattttattttatttttattttttgagatggagtctcattctctcgcccaggctggagtgcagtggcgcgatctcggctcactgcaagctccgcctcccgggttcaagcgattctcctgcctcagcctcccgagtagctgggactataggcgtgtgccaccatgcctggctaattttttgtatttttagtagagacgaggtttcaccgtgttagccaggctggtctcaatctcctgaccttgtgatctgcctgccttggactcccaaagtgctgggattacaggcgtgagccaccaggcccggccggagttacttttattaagcaacaggggtcctctttgcttaaaattcaacaacaggacatgtgctttgttgcaagggtagatttaggttagtcatgatgaccttcctcagtctactacaggcaagttctttaaactctgagtttctttatgaaatgaggatgatgatagtgcttacttatacagttgctctaggattaagtgaaatactacaagtaaagcatttggtgtggggcttggcatctagtaagaataatgatagcataaaatttctagaacagatttcaaagagatgctacaataccttctatttctagggtatttctagagatacttcaggaaaaaggagcacccgtcttggatagttgggttcgggctaatgattttgattgcagcacaagaaaaataattaaccttcagaaatgggcctgcatctatgacaataagcagcatctaaaaaagtcataaattgtttcagaaggtgatttagcctatggaatagtttgatgttggttatctcttttggatactttagggtaagatgatggcatgcaaacactgcagtgacattttcagcaaggagggtgctttgaaactagcagccacaggcagagaggaccagggaattgaaacagatgatgagaaggactcacttaagaagcagctgagagagatggaactggaactggcacaaaccaaactgcagttggtggaggccaagtgtaaaattcaggttggtgatttgataaaagaacaagaagaaagaataaacaattaatggtccaggatactctagtacttcagaatacacctatctaggtcagaattgtatgatgaatacattttctgtctgctaatgtgtcctgcataatcacattttatatcatgtattcttaacgctgatataaacaaatatataattttaaatgaaattttaataattaaaattatatcttatgggaatttaattaagcatatgcttgttttttttaccctgagattttttgcttacatcctttctcacagaatgtggtcacttcagtggctgatcctgaaaatgaaaaaccaaaccccctctgctgtgtctaccctgagagtcacacattggctgacacccgttctttcctttagagcttctttttatctttagctcattttgtcaaacctctttccccattatctttctccatattggcgcataatataattagaaatagtcctggcttctgatggactcttcttcatttcattttcccagtgatccctaccagcaccatggctgccatgtcaccagcctccaccacaccagccagcttccaccatgtgtctgctctgaccttggacattcttagggcaaagcctatttctttggaactggaattcattcatgcttctactatcagtaaaaattcatccatatgtttacatttatttgtggtttttaaacctgttatatcggattgcaacctaaacctaaatttggacctaacttgcagggaaaaaaagaataaaatgagcttttctttcactgtttaaagaaagcacagattctagatttttgataagtcttttagctcttaactttatccttgtactaagaagccaattcaatctctcctgggttttgtgggaggaaaattggcagcacataccttgagactccaaaaagctgcacacttttatttatttattggcaaagagaaaacatttatttaactcagatgattttcttgctttaattaggaacttgaacatcagagaggagcccttatgaatgaaatccaagctgcgaaaaactcttggtttagcaaaaccctgaactctatcaaaacggccacgggcacccagccattgcagccagcaccggtcacccagccacccaaggagagcacatagttccagccttacccaagcacaagagcacaatgttcaaaccaatggaaatctgggaggattcttcctggtgtccctttgaaggaaagtcaaggaggccagaaaacaagccagaatttttcagtagctctcactctttcttgtatgacacttttcaaagggatgctatttaaactgacctgttctatgttgaatacctattttccagcttctggaaggccatgttcagatccatcatagtattacacattattttgtttgcctgatgtttagttggaaataagtaattcagaactaaatgcttttttatttagaattattcataattatttttatcttacataaaaatggagacatctgttattccaaggttgaagtgataagaagatctttgtcacaggaaaaaaaaaattgaaacctaaacatcttaagttttcaggatttattcagataaagcacactgtggggccaggcatgaccactctcaggtttcctcctgagcctgattcccagggaagtgttaatcctgtccaaaggaaagaaccaatcagcgatcattggtttactttcattttctgttcggtacatctggaaatgaagtgccaggaatagacgggctgttcagattatacgctaggtaaaaggaactgaaattttaataagtgtaggtcaggatcatttgggctgtggtattctaacagatccttttaagaatgccacataggacttgtgagttcctaagtacaccaaagtatggacacagatgtgacttctggcaattataaagttaaaggtggatattgcaccttacagacttagggagcctttaccagagacgcctaaaaagccccaggttcagccattgtgctgaatagagtggaatatagaaccagggacagagtatttcatttaacgttgatatatacttgctaaggaaacactaacaatactgtaactttgttaaaggacatagtattgaaatgggaaatagaggtcaggctcacatcatcttagtttaatgctgggcaactttttctgatttctgtagttccctgaaaatgtgtccttcgtacccataaagagatacaaatgcatttgtaacatttttgattgaatataaaacctttacagaaatacttatctcatggaaaggtaaagctattgtttaaaaattagtggaaatattttttcaattatatttaacatgcctataaaaatagtccttgcaggaaattatttgataagagcaaaactatttttattttataaactattttggaggcctctgatcctttcaaaccaaccaaactactattagatatgtacaataacatttgttgatattaatcattggcctcattgttgaacatattatttgcaaagaatcttaaactctgtagtgccagaatgattctcatctgtgccatattttgcaattaaaagtaacacacccttagaagaatcaaataagagccatctacatcccaggaggatgcaccaagttgctcacagtggatcttttcctctaaaatgatcttttatgttctaaaaagtgaaatcccctttatctgtgtttatattctctacagcccataaaactgatgtgattgttatgttatactcatcagataatacttttcttacataaatctttcattgttgttctgacatctttcattacaaaatttattttcttaacaaaaaggaacataacccagcattccaagtgtctgtgttggctttaacattctctacatggtggtctagataagctaatttttttttttttttttttgtaaaatgtaatagctagaaaatgttatcttggcgcttgtttttgtaaatcatttagtataggctgttagctttactggtactttacgctttgattccaagaagccttgtgcagttgccttatcaaatggccagctaaattaaagatgctcttttgtgttgtgaatttcatagttctgtacagagcttgtttcaatttacaaaaataagtacattccacagaatgcctaaagtgtgtaattttctttaaataatagtaggtgagggagaaacataatggctctaggtcaatcccttatctaaagaccttgttcaacttcatagtccctttccttttaaagaggagaagagaaaaatcccccctggccaggcatggtggctcacatctgtaatcccagcactttgggaggctgaggtgggtggatcacctaaggtcaggagtttgagaccagcctggccaacatggtgaaaccctatctctactgcaaaatacaaaaattagccgggcttggtggcgggtgcctgtaatcccagctactcgggaggttgaggcaggagaatcacttgaacccaggaggcagaggttgcagtgggccaagattacggcattacattccatccagcctgggcgacaagagcaaaattccgtctcgaaaaatcaccaggtacatacctctcaagtttgataagtccatcttttgagttttcttttagctctttcaaaagattacgagggcaatacatattttttttttttttattctccagccccatatcatacttgggtatgcctgttggtaccataagcctaaactctccttcactgcaatgcctttgagtcagtagcaatagtaaagactagaaacaaagaaaattcagaatttggtatgtgatatgattgttcatacaatatgttataatagcaatattccaaacaatatgtccttcactgtctattgttggaaaactcatgcatcccagcatgaagtaactcctagttttaattttagttattttgagatatatttgagaattgcatctcttctcttgaatttcacttagaagagattaaccagccaaatatccaggaaagtttcaaaacattctagtgtttttcatcctttgctaggatgcactctgtacaaaacattcctctgaaaatctaatatttgcagtatctaagaattgatcatttctattttcattaaattctgtggaaaaaattaaatgaatgaaattcaacttcataattcagttcatcagcttttgtatcttgagaatctaaacacgtctttaaatctgaaagaaaccaagctggattttgcagtgcatatgtttgctagcttcccacatcctgaaccatgtcaaaatttggttttatttagttacatataatttaatgcaaagaaattctgttacttaatgttctgtttatttatgagtgcctatcaggaacactaataggaatgccattcaaccagtgtcttctgcccctctcccagctgttaaattagtacttcttcattggctttctgaaatgtcctgagtaaagtagaaaagcaacctttgtatggatgtggggatatttaatagtatgtatcttgtttcatttttttcctatgatgtattaatatttatttttctccaacccctgctccattttcttaaaatattttccagttaataactagttgctttatttcctagctgaagtgagaaaaccaacggaaaacaatacagatttgggcagaggagatagagttacatctttaaaggagtgagccagtcacccaggagaatcacatgtgtaactgatgtaggggtttaagtcttcatactttcactaaaatctgtctactaactctcccaccaacctttgcatcaaacacttaggtacctgcctgattaggggggcccctttaagggaaaaaacttttaaaaaattaaatgccttggttttgttttatcttctgggaaagaacacttttacttgattagcaagatgattatattatataacttgcccttaaaaacactccaaaatactgactccttttctccaattacaaatgagtgtgaagaaattctgttgtatgatttgaacactattaggtttgtatgtgtgtttaattggaagaattttatatagagtatctctgctgcttttgtttacctgggtaccacacaaccaaatacacattgagatttcaagaaatgatgatgaaagccagaaggccagaccacagctctgcagcctgtttcctacaaccagatataaaactctttctcgtcgccatgctgatagtcacactgaactagaactgtcccaacacattcttcctctctcataatggcttccatttaatacaggcaaagccctttaccttagcaaattctttatctttcaaaagtgaccaaaatgaggacttcaaccttggctgcacctcaataggagatgctgatcttgagttgtaatgagaaaagtgggcatataggagattttagtgactgcagtcagctgtctggcattcctttctcagtttgcatctaaaagactacatatgtcaagcttatctccacctgaatttgctgcctgctataaaaacatttcattaatatatcccattcttcctacctccatctctggtttgtcattagtggtattctgaaaagcttaagaaaaaagaatcattgagtagaaagtgaacattttaagttattttcctttttcattggcaattagttaacatgtaaaatcttttccattaaactgtataacttttaataactatatattatatatgggataaaatatatggactgaattgtgagaatataaatgcatcgaaagactctggtgtcatgaaagcacaagaataaggctggagatggtcccagatccaagatgtcccaaaagccttttgtatcagtttctctatttttggtattttgcataatgcatggatccttagttcaaatgagggacaaagtttctcagtcagccccacttcctttctttctaactcctacctttcccttgcagaggaggtagtagagattctggaattgtctatttttatgaattccattattttgtccatggcatctctaatgaaaacaggttctagaataaaggagttgattagtctgaacagtactaattaactacaaaataaacgttagtgatcagcctcttcctctataaacaatgaccaattagacgtttccgtaattccatgtattatgtatagtacactctataaatgtaaatgtaatgcttgtctaaaaagtgcaatttattgtacattgtcccaacaaatgtttacttttataatcgttatgaacttgaattggattagtatcttgtttttatgtgtgaatgaagccttgtgaaataaacaaatgcaactgagaaggtaacaaggtgactgtttttgtgagccagtgatgttttcaatgctttgtgttgcccctttggccccattaagcagtaataaacatttgttctgaagtcca

SEQ ID NO: 245 - DNA, 1763 bp, Homo Sapiens
ttttctctaggcctactctgtgtatgatgaagacattgggtactgtcaagggcagtcttttcttgctgctgtattactgctgcatatgccagaggaacaagcattctgtgttttggtgaaaatcatgtacgactatggtttgagagacctctacagaaacaacttcgaagatcttcattgcaaattctaccagttggagagactaatgcaggaacagctaccggacctgcatagccatttttctgatctgaacctggaagctcatatgtatgcatcccagtggtttctcactctttttactgccaagttcccactctgcatggtgttccacatcattgacttactgctttgtgagggtttgaacataatctttcatgtagctttggctctcctaaagacctcaaaggaagaccttctgcaggctgattttgaaggtgctttaaagttctttagagttcagcttccaaagagatacagggcagaggaaaatgcaagaagactgatggagcaggcttgcaatattaaagtaccaaccaagaagctgaagaaatatgagaaagaatatcagacaatgcgagagagtcagctgcaacaggaagacccaatggatagatacaagagggagaaccgaagattacaggaggccagcatgaggttggaacaagagaatgatgaccttgcccatgaactagtaacaagcaaaattgctctacggaatgacttggatcaggcagaagacaaggcagatgtgttgaataaagagctccttttgaccaaacagaggctggtggagactgaagaggagaagaggaagcaagaggaagagactgcccagctaaaagaagtcttcaggaaacagctagagaaggcagaatatgaaataaagaagactacagctatcattgctgagtataaacagatctgttcgcagttgagtaccaggctggagaaacagcaagcagccagcaaggaggagctggaagtggtaaagggtaagatgatggcatgcaaacactgcagtgacattttcagcaaggagggtgctttgaaactagcagccacaggcagagaggaccagggaattgaaacagatgatgagaaggactcacttaagaagcagctgagagagatggaactggaactggcacaaaccaaactgcagttggtggaggccaagtgtaaaattcaggaacttgaacatcagagaggagcccttatgaatgaaatccaagctgcgaaaaactcttggtttagcaaaaccctgaactctatcaaaacggccacgggcacccagccattgcagccagcaccggtcacccagccacccaaggagagcacatagttccagccttacccaagcacaagagcacaatgttcaaaccaatggaaatctgggaggattcttcctggtgtccctttgaaggaaagtcaaggaggccagaaaacaagccagaatttttcagtagctctcactctttcttgtatgacacttttcaaagggatgctatttaaactgacctgttctatgttgaatacctattttccagcttctggaaggccatgttcagatccatcatagtattacacattatttttagaattattcataattatttttatcttacataaaaatggagacatctgttattccaaggttgaagtgataagaagatctttgtcacaggaaaaaaaaaattgaaacctaaacatcttaagttttcaggatttattcagataaagcacactgtggggccaggcatgac

SEQ ID NO: 246 - protein, 418 aa, Homo Sapiens
MPEEQAFCVLVKIMYDYGLRDLYRNNFEDLHCKFYQLERLMQEQLPDLHSHFSDLNLEAHMYASQWFLTLFTAKFPLCMVFHIIDLLLCEGLNIIFHVALALLKTSKEDLLQADFEGALKFFRVQLPKRYRAEENARRLMEQACNIKVPTKKLKKYEKEYQTMRESQLQQEDPMDRYKRENRRLQEASMRLEQENDDLAHELVTSKIALRNDLDQAEDKADVLNKELLLTKQRLVETEEEKRKQEEETAQLKEVFRKQLEKAEYEIKKTTAIIAEYKQICSQLSTRLEKQQAASKEELEVVKGKMMACKHCSDIFSKEGALKLAATGREDQGIETDDEKDSLKKQLREMELELAQTKLQLVEAKCKIQELEHQRGALMNEIQAAKNSWFSKTLNSIKTATGTQPLQPAPVTQPPKEST

SEQ ID NO: 247 - DNA, 654 bp, Homo Sapiens
cgggagtgtggctggtttctgttgcctgttttgatactcttctcctggtgggtgtgtacactggcactgagctgcagtaggatttttccttggatagtctggtctggagctgggacagcagctgctgctgtggaaaggccagctggcaagatgatggaagaaatctccattatggtagcctatgacgcccatgttttcagccagctgcacgatgaagacttcctcactagtctggtggccatcagcaagcccaggtctatggtaccaaccaagaagctgaagaaatatgagaaagaatatcagacaatgcgagagagtcagctgcaacaggaagacccaatggatagatacaagtttgtatatttgtaggtaactccagctgttgcatttatactgggaatcttcataagaagctgagagaaagagaggggaaaaagaaagtggctttctactttcaaaaatgaaacaaaaaggaaaaatggcaaagtactgttttagctgtgcatgtcatatccacaaagacttttagcaggtgaactgttccaagactgacacaaggatgtttcaaacttgcctctgtctgtagaaaatgttaaaaataccaactcacttggaaggaaaaataaaaatcacaaaggtatattgagcacagta

SEQ ID NO: 248 - protein, 72 aa, Homo Sapiens
MMEEISIMVAYDAHVFSQLHDEDFLTSLVAISKPRSMVPTKKLKKYEKEYQTMRESQLQQEDPMDRYKFVYL

SEQ ID NO: 249 - DNA, 725 bp, Homo Sapiens
ttttctctaggcctactctgtgtatgatgaagacattgggtactgtcaagggcagtcttttcttgctgctgtattactgctgcatatgccagaggaacaagcattctgtgttttggtgaaaatcatgtacgactatggtttgagagacctctacagaaacaacttcgaagatcttcattgcaaattctaccagttggagagactaatgcaggaacagctaccggacctgcatagccatttttctgatctgaacctggaagctcatatgtatgcatcccagtggtttctcactctttttactgccaagttcccactctgcatggtgttccacatcattgacttactgctttgtgagagtggtatctctgcccttcagttcactgggatggtgactttctaaagttgtctgcccgaatgttggcacccgtggcatcggaacattgtccatgggttttctggaacctagattcaaattttatcttgaagatacatgaatttctaatgtcagttaagaaaactagcaacatttgtgctacagaaaagataaataaatttattagccttcccgtcacttgtcaactgtgacttacaatcagtgtttgaaaggtcataatgttcattaatattaataagaacatcatagatattacctttcctccccttaaacctgtactctatagctgtttaaggaagttggaaaacttttcaaaacatagattgtaatc

SEQ ID NO: 250 - protein, 104 aa, Homo Sapiens
MPEEQAFCVLVKIMYDYGLRDLYRNNFEDLHCKFYQLERLMQEQLPDLHSHFSDLNLEAHMYASQWFLTLFTAKFPLCMVFHIIDLLLCESGISALQFTGMVTF

SEQ ID NO: 251 - DNA, 6979 bp, Homo Sapiens
gcgagaggcagcagcagcagcagtagcagcagcagcagcaacaacagcgctgcttgtcacgaatcgaggattgcaatgagctcatcgttttctccttgcagcttcacaactgccctggcttcctggctactgctgctgctgtcttctcacacatagacacgcacacacaccctttctcgcacacacacacacacacacacacacactctcacacattctcacatgctagacccttctaagcagcttgtccgtttttacacatgtatctgaactctcctgcatcactcttggccattttctcgcattcgattgcttttgccgttttttatttagatcagtacttgatttcattttcattttccagtctactttggggttctcgcagtggataatttagccaaaatgtttttcttgtggagacattagctgacaattcccaccacagactggcttgtacgtcctcccagggagacctaaacctggctcccctcccaccgcagttcttaatattgtggataagagatccatctttctcattctggatacctacttagtgctcatggaagaaggggtgccctgcccagccccagctgctaagctcacacctcctgtcaaaaagtcccaggacatgcacgacgagaggagcaagctggtgaatgagtatgcgtgtcgagtgctggaacttctggggatggggcatcgtctgtttgtgcctcggcttctggcgacctcaaaggaagaccttctgcaggctgattttgaaggtgctttaaagttctttagagttcagcttccaaagagatacagggcagaggaaaatgcaagaagactgatggagcaggcttgcaatattaaagtaccaaccaagaagctgaagaaatatgagaaagaatatcagacaatgcgagagagtcagctgcaacaggaagacccaatggatagatacaagagggagaaccgaagattacaggaggccagcatgaggttggaacaagagaatgatgaccttgcccatgaactagtaacaagcaaaattgctctacggaatgacttggatcaggcagaagacaaggcagatgtgttgaataaagagctccttttgaccaaacagaggctggtggagactgaagaggagaagaggaagcaagaggaagagactgcccagctaaaagaagtcttcaggaaacagctagagaaggcagaatatgaaataaagaagactacagctatcattgctgagtataaacagatctgttcgcagttgagtaccaggctggagaaacagcaagcagccagcaaggaggagctggaagtggtaaagggtaagatgatggcatgcaaacactgcagtgacattttcagcaaggagggtgctttgaaactagcagccacaggcagagaggaccagggaattgaaacagatgatgagaaggactcacttaagaagcagctgagagagatggaactggaactggcacaaaccaaactgcagttggtggaggccaagtgtaaaattcaggaacttgaacatcagagaggagcccttatgaatgaaatccaagctgcgaaaaactcttggtttagcaaaaccctgaactctatcaaaacggccacgggcacccagccattgcagccagcaccggtcacccagccacccaaggagagcacatagttccagccttacccaagcacaagagcacaatgttcaaaccaatggaaatctgggaggattcttcctggtgtccctttgaaggaaagtcaaggaggccagaaaacaagccagaatttttcagtagctctcactctttcttgtatgacacttttcaaagggatgctatttaaactgacctgttctatgttgaatacctattttccagcttctggaaggccatgttcagatccatcatagtattacacattattttgtttgcctgatgtttagttggaaataagtaattcagaactaaatgcttttttatttagaattattcataattatttttatcttacataaaaatggagacatctgttattccaaggttgaagtgataagaagatctttgtcacaggaaaaaaaaaattgaaacctaaacatcttaagttttcaggatttattcagataaagcacactgtggggccaggcatgaccactctcaggtttcctcctgagcctgattcccagggaagtgttaatcctgtccaaaggaaagaaccaatcagcgatcattggtttactttcattttctgttcggtacatctggaaatgaagtgccaggaatagacgggctgttcagattatacgctaggtaaaaggaactgaaattttaataagtgtaggtcaggatcatttgggctgtggtattctaacagatccttttaagaatgccacataggacttgtgagttcctaagtacaccaaagtatggacacagatgtgacttctggcaattataaagttaaaggtggatattgcaccttacagacttagggagcctttaccagagacgcctaaaaagccccaggttcagccattgtgctgaatagagtggaatatagaaccagggacagagtatttcatttaacgttgatatatacttgctaaggaaacactaacaatactgtaactttgttaaaggacatagtattgaaatgggaaatagaggtcaggctcacatcatcttagtttaatgctgggcaactttttctgatttctgtagttccctgaaaatgtgtccttcgtacccataaagagatacaaatgcatttgtaacatttttgattgaatataaaacctttacagaaatacttatctcatggaaaggtaaagctattgtttaaaaattagtggaaatattttttcaattatatttaacatgcctataaaaatagtccttgcaggaaattatttgataagagcaaaactatttttattttataaactattttggaggcctctgatcctttcaaaccaaccaaactactattagatatgtacaataacatttgttgatattaatcattggcctcattgttgaacatattatttgcaaagaatcttaaactctgtagtgccagaatgattctcatctgtgccatattttgcaattaaaagtaacacacccttagaagaatcaaataagagccatctacatcccaggaggatgcaccaagttgctcacagtggatcttttcctctaaaatgatcttttatgttctaaaaagtgaaatcccctttatctgtgtttatattctctacagcccataaaactgatgtgattgttatgttatactcatcagataatacttttcttacataaatctttcattgttgttctgacatctttcattacaaaatttattttcttaacaaaaaggaacataacccagcattccaagtgtctgtgttggctttaacattctctacatggtggtctagataagctaatttttttttttttttttttgtaaaatgtaatagctagaaaatgttatcttggcgcttgtttttgtaaatcatttagtataggctgttagctttactggtactttacgctttgattccaagaagccttgtgcagttgccttatcaaatggccagctaaattaaagatgctcttttgtgttgtgaatttcatagttctgtacagagcttgtttcaatttacaaaaataagtacattccacagaatgcctaaagtgtgtaattttctttaaataatagtaggtgagggagaaacataatggctctaggtcaatcccttatctaaagaccttgttcaacttcatagtccctttccttttaaagaggagaagagaaaaatcccccctggccaggcatggtggctcacatctgtaatcccagcactttgggaggctgaggtgggtggatcacctaaggtcaggagtttgagaccagcctggccaacatggtgaaaccctatctctactgcaaaatacaaaaattagccgggcttggtggcgggtgcctgtaatcccagctactcgggaggttgaggcaggagaatcacttgaacccaggaggcagaggttgcagtgggccaagattacggcattacattccatccagcctgggcgacaagagcaaaattccgtctcgaaaaatcaccaggtacatacctctcaagtttgataagtccatcttttgagttttcttttagctctttcaaaagattacgagggcaatacatattttttttttttttattctccagccccatatcatacttgggtatgcctgttggtaccataagcctaaactctccttcactgcaatgcctttgagtcagtagcaatagtaaagactagaaacaaagaaaattcagaatttggtatgtgatatgattgttcatacaatatgttataatagcaatattccaaacaatatgtccttcactgtctattgttggaaaactcatgcatcccagcatgaagtaactcctagttttaattttagttattttgagatatatttgagaattgcatctcttctcttgaatttcacttagaagagattaaccagccaaatatccaggaaagtttcaaaacattctagtgtttttcatcctttgctaggatgcactctgtacaaaacattcctctgaaaatctaatatttgcagtatctaagaattgatcatttctattttcattaaattctgtggaaaaaattaaatgaatgaaattcaacttcataattcagttcatcagcttttgtatcttgagaatctaaacacgtctttaaatctgaaagaaaccaagctggattttgcagtgcatatgtttgctagcttcccacatcctgaaccatgtcaaaatttggttttatttagttacatataatttaatgcaaagaaattctgttacttaatgttctgtttatttatgagtgcctatcaggaacactaataggaatgccattcaaccagtgtcttctgcccctctcccagctgttaaattagtacttcttcattggctttctgaaatgtcctgagtaaagtagaaaagcaacctttgtatggatgtggggatatttaatagtatgtatcttgtttcatttttttcctatgatgtattaatatttatttttctccaacccctgctccattttcttaaaatattttccagttaataactagttgctttatttcctagctgaagtgagaaaaccaacggaaaacaatacagatttgggcagaggagatagagttacatctttaaaggagtgagccagtcacccaggagaatcacatgtgtaactgatgtaggggtttaagtcttcatactttcactaaaatctgtctactaactctcccaccaacctttgcatcaaacacttaggtacctgcctgattaggggggcccctttaagggaaaaaacttttaaaaaattaaatgccttggttttgttttatcttctgggaaagaacacttttacttgattagcaagatgattatattatataacttgcccttaaaaacactccaaaatactgactccttttctccaattacaaatgagtgtgaagaaattctgttgtatgatttgaacactattaggtttgtatgtgtgtttaattggaagaattttatatagagtatctctgctgcttttgtttacctgggtaccacacaaccaaatacacattgagatttcaagaaatgatgatgaaagccagaaggccagaccacagctctgcagcctgtttcctacaaccagatataaaactctttctcgtcgccatgctgatagtcacactgaactagaactgtcccaacacattcttcctctctcataatggcttccatttaatacaggcaaagccctttaccttagcaaattctttatctttcaaaagtgaccaaaatgaggacttcaaccttggctgcacctcaataggagatgctgatcttgagttgtaatgagaaaagtgggcatataggagattttagtgactgcagtcagctgtctggcattcctttctcagtttgcatctaaaagactacatatgtcaagcttatctccacctgaatttgctgcctgctataaaaacatttcattaatatatcccattcttcctacctccatctctggtttgtcattagtggtattctgaaaagcttaagaaaaaagaatcattgagtagaaagtgaacattttaagttattttcctttttcattggcaattagttaacatgtaaaatcttttccattaaactgtataacttttaataactatatattatatatgggataaaatatatggactgaattgtgagaatataaatgcatcgaaagactctggtgtcatgaaagcacaagaataaggctggagatggtcccagatccaagatgtcccaaaagccttttgtatcagtttctctatttttggtattttgcataatgcatggatccttagttcaaatgagggacaaagtttctcagtcagccccacttcctttctttctaactcctacctttcccttgcagaggaggtagtagagattctggaattgtctatttttatgaattccattattttgtccatggcatctctaatgaaaacaggttctagaataaaggagttgattagtctgaacagtactaattaactacaaaataaacgttagtgatcagcctcttcctctataaacaatgaccaattagacgtttccgtaattccatgtattatgtatagtacactctataaatgtaaatgtaatgcttgtctaaaaagtgcaatttattgtacattgtcccaacaaatgtttacttttataatcgttatgaacttgaattggattagtatcttgtttttatgtgtgaatgaagccttgtgaaataaacaaatgcaactgagaaggtaacaaggtgactgtttttgtgagccagtgatgttttcaatgctttgtgttgcccctttggccccattaagcagtaataaacatttgttctgaagtcca

SEQ ID NO: 252 - protein, 370 aa, Homo Sapiens
MEEGVPCPAPAAKLTPPVKKSQDMHDERSKLVNEYACRVLELLGMGHRLFVPRLLATSKEDLLQADFEGALKFFRVQLPKRYRAEENARRLMEQACNIKVPTKKLKKYEKEYQTMRESQLQQEDPMDRYKRENRRLQEASMRLEQENDDLAHELVTSKIALRNDLDQAEDKADVLNKELLLTKQRLVETEEEKRKQEEETAQLKEVFRKQLEKAEYEIKKTTAIIAEYKQICSQLSTRLEKQQAASKEELEVVKGKMMACKHCSDIFSKEGALKLAATGREDQGIETDDEKDSLKKQLREMELELAQTKLQLVEAKCKIQELEHQRGALMNEIQAAKNSWFSKTLNSIKTATGTQPLQPAPVTQPPKEST

SEQ ID NO: 253 - DNA, 2046 bp, Homo Sapiens
ttttctctaggcctactctgtgtatgatgaagacattgggtactgtcaagggcagtcttttcttgctgctgtattactgctgcatatgccagaggaacaagcattctgtgttttggtgaaaatcatgtacgactatggtttgagagacctctacagaaacaacttcgaagatcttcattgcaaattctaccagttggagagactaatgcaggaacagctaccggacctgcatagccatttttctgatctgaacctggaagctcatatgtatgcatcccagtggtttctcactctttttactgccaagttcccactctgcatggtgttccacatcattgacttactgctttgtgagggtttgaacataatctttcatgtagctttggctctcctaaagacctcaaaggaagaccttctgcaggctgattttgaaggtgctttaaagttctttagagttcagcttccaaagagatacagggcagaggaaaatgcaagaagactgatggagcaggcttgcaatattaaagtaccaaccaagaagctgaagaaatatgagaaagaatatcagacaatgcgagagagtcagctgcaacaggaagacccaatggatagatacaagtttgtatatttgtaggtaactccagctgttgcatttatactgggaatcttcataagaagctgagagaaagagaggggaaaaagaaagtggctttctactttcaaaaatgaaacaaaaaggaaaaatggcaaagtactgttttagctgtgcatgtcatatccacaaagacttttagcaggtgaactgttccaagactgacacaaggatgtttcaaacttgcctctgtctgtagaaaatgttaaaaataccaactcacttggaaggaaaaataaaaatcacaaagagggagaaccgaagattacaggaggccagcatgaggttggaacaagagaatgatgaccttgcccatgaactagtaacaagcaaaattgctctacggaatgacttggatcaggcagaagacaaggcagatgtgttgaataaagagctccttttgaccaaacagaggctggtggagactgaagaggagaagaggaagcaagaggaagagactgcccagctaaaagaagtcttcaggaaacagctagagaaggcagaatatgaaataaagaagactacagctatcattgctgagtataaacagatctgttcgcagttgagtaccaggctggagaaacagcaagcagccagcaaggaggagctggaagtggtaaagggtaagatgatggcatgcaaacactgcagtgacattttcagcaaggagggtgctttgaaactagcagccacaggcagagaggaccagggaattgaaacagatgatgagaaggactcacttaagaagcagctgagagagatggaactggaactggcacaaaccaaactgcagttggtggaggccaagtgtaaaattcaggaacttgaacatcagagaggagcccttatgaatgaaatccaagctgcgaaaaactcttggtttagcaaaaccctgaactctatcaaaacggccacgggcacccagccattgcagccagcaccggtcacccagccacccaaggagagcacatagttccagccttacccaagcacaagagcacaatgttcaaaccaatggaaatctgggaggattcttcctggtgtccctttgaaggaaagtcaaggaggccagaaaacaagccagaatttttcagtagctctcactctttcttgtatgacacttttcaaagggatgctatttaaactgacctgttctatgttgaatacctattttccagcttctggaaggccatgttcagatccatcatagtattacacattatttttagaattattcataattatttttatcttacataaaaatggagacatctgttattccaaggttgaagtgataagaagatctttgtcacaggaaaaaaaaaattgaaacctaaacatcttaagttttcaggatttattcagataaagcacactgtggggccaggcatgac

SEQ ID NO: 254 - protein, 256 aa, Homo Sapiens
MLKIPTHLEGKIKITKRENRRLQEASMRLEQENDDLAHELVTSKIALRNDLDQAEDKADVLNKELLLTKQRLVETEEEKRKQEEETAQLKEVFRKQLEKAEYEIKKTTAIIAEYKQICSQLSTRLEKQQAASKEELEVVKGKMMACKHCSDIFSKEGALKLAATGREDQGIETDDEKDSLKKQLREMELELAQTKLQLVEAKCKIQELEHQRGALMNEIQAAKNSWFSKTLNSIKTATGTQPLQPAPVTQPPKEST

SEQ ID NO: 255 - DNA, 6582 bp, Homo Sapiens
atgcctgttctaaacaggcctggagatttgagcaagttctcaggacagcaactagaagaagggtttgaacataatctttcatgtagctttggctctcctaaagttcttaatattgtggataagagatccatctttctcattctggatacctacttagtgctcatggaagaaggggtgccctgcccagccccagctgctaagctcacacctcctgtcaaaaagtcccaggacatgcacgacgagaggagcaagctggtgaatgagtatgcgtgtcgagtgctggaacttctggggatggggcatcgtctgtttgtgcctcggcttctggcgacctcaaaggaagaccttctgcaggctgattttgaaggtgctttaaagttctttagagttcagcttccaaagagatacagggcagaggaaaatgcaagaagactgatggagcaggcttgcaatattaaagtaccaaccaagaagctgaagaaatatgagaaagaatatcagacaatgcgagagagtcagctgcaacaggaagacccaatggatagatacaagagggagaaccgaagattacaggaggccagcatgaggttggaacaagagaatgatgaccttgcccatgaactagtaacaagcaaaattgctctacggaatgacttggatcaggcagaagacaaggcagatgtgttgaataaagagctccttttgaccaaacagaggctggtggagactgaagaggagaagaggaagcaagaggaagagactgcccagctaaaagaagtcttcaggaaacagctagagaaggcagaatatgaaataaagaagactacagctatcattgctgagtataaacagatctgttcgcagttgagtaccaggctggagaaacagcaagcagccagcaaggaggagctggaagtggtaaagggtaagatgatggcatgcaaacactgcagtgacattttcagcaaggagggtgctttgaaactagcagccacaggcagagaggaccagggaattgaaacagatgatgagaaggactcacttaagaagcagctgagagagatggaactggaactggcacaaaccaaactgcagttggtggaggccaagtgtaaaattcaggaacttgaacatcagagaggagcccttatgaatgaaatccaagctgcgaaaaactcttggtttagcaaaaccctgaactctatcaaaacggccacgggcacccagccattgcagccagcaccggtcacccagccacccaaggagagcacatagttccagccttacccaagcacaagagcacaatgttcaaaccaatggaaatctgggaggattcttcctggtgtccctttgaaggaaagtcaaggaggccagaaaacaagccagaatttttcagtagctctcactctttcttgtatgacacttttcaaagggatgctatttaaactgacctgttctatgttgaatacctattttccagcttctggaaggccatgttcagatccatcatagtattacacattattttgtttgcctgatgtttagttggaaataagtaattcagaactaaatgcttttttatttagaattattcataattatttttatcttacataaaaatggagacatctgttattccaaggttgaagtgataagaagatctttgtcacaggaaaaaaaaaattgaaacctaaacatcttaagttttcaggatttattcagataaagcacactgtggggccaggcatgaccactctcaggtttcctcctgagcctgattcccagggaagtgttaatcctgtccaaaggaaagaaccaatcagcgatcattggtttactttcattttctgttcggtacatctggaaatgaagtgccaggaatagacgggctgttcagattatacgctaggtaaaaggaactgaaattttaataagtgtaggtcaggatcatttgggctgtggtattctaacagatccttttaagaatgccacataggacttgtgagttcctaagtacaccaaagtatggacacagatgtgacttctggcaattataaagttaaaggtggatattgcaccttacagacttagggagcctttaccagagacgcctaaaaagccccaggttcagccattgtgctgaatagagtggaatatagaaccagggacagagtatttcatttaacgttgatatatacttgctaaggaaacactaacaatactgtaactttgttaaaggacatagtattgaaatgggaaatagaggtcaggctcacatcatcttagtttaatgctgggcaactttttctgatttctgtagttccctgaaaatgtgtccttcgtacccataaagagatacaaatgcatttgtaacatttttgattgaatataaaacctttacagaaatacttatctcatggaaaggtaaagctattgtttaaaaattagtggaaatattttttcaattatatttaacatgcctataaaaatagtccttgcaggaaattatttgataagagcaaaactatttttattttataaactattttggaggcctctgatcctttcaaaccaaccaaactactattagatatgtacaataacatttgttgatattaatcattggcctcattgttgaacatattatttgcaaagaatcttaaactctgtagtgccagaatgattctcatctgtgccatattttgcaattaaaagtaacacacccttagaagaatcaaataagagccatctacatcccaggaggatgcaccaagttgctcacagtggatcttttcctctaaaatgatcttttatgttctaaaaagtgaaatcccctttatctgtgtttatattctctacagcccataaaactgatgtgattgttatgttatactcatcagataatacttttcttacataaatctttcattgttgttctgacatctttcattacaaaatttattttcttaacaaaaaggaacataacccagcattccaagtgtctgtgttggctttaacattctctacatggtggtctagataagctaatttttttttttttttttttgtaaaatgtaatagctagaaaatgttatcttggcgcttgtttttgtaaatcatttagtataggctgttagctttactggtactttacgctttgattccaagaagccttgtgcagttgccttatcaaatggccagctaaattaaagatgctcttttgtgttgtgaatttcatagttctgtacagagcttgtttcaatttacaaaaataagtacattccacagaatgcctaaagtgtgtaattttctttaaataatagtaggtgagggagaaacataatggctctaggtcaatcccttatctaaagaccttgttcaacttcatagtccctttccttttaaagaggagaagagaaaaatcccccctggccaggcatggtggctcacatctgtaatcccagcactttgggaggctgaggtgggtggatcacctaaggtcaggagtttgagaccagcctggccaacatggtgaaaccctatctctactgcaaaatacaaaaattagccgggcttggtggcgggtgcctgtaatcccagctactcgggaggttgaggcaggagaatcacttgaacccaggaggcagaggttgcagtgggccaagattacggcattacattccatccagcctgggcgacaagagcaaaattccgtctcgaaaaatcaccaggtacatacctctcaagtttgataagtccatcttttgagttttcttttagctctttcaaaagattacgagggcaatacatattttttttttttttattctccagccccatatcatacttgggtatgcctgttggtaccataagcctaaactctccttcactgcaatgcctttgagtcagtagcaatagtaaagactagaaacaaagaaaattcagaatttggtatgtgatatgattgttcatacaatatgttataatagcaatattccaaacaatatgtccttcactgtctattgttggaaaactcatgcatcccagcatgaagtaactcctagttttaattttagttattttgagatatatttgagaattgcatctcttctcttgaatttcacttagaagagattaaccagccaaatatccaggaaagtttcaaaacattctagtgtttttcatcctttgctaggatgcactctgtacaaaacattcctctgaaaatctaatatttgcagtatctaagaattgatcatttctattttcattaaattctgtggaaaaaattaaatgaatgaaattcaacttcataattcagttcatcagcttttgtatcttgagaatctaaacacgtctttaaatctgaaagaaaccaagctggattttgcagtgcatatgtttgctagcttcccacatcctgaaccatgtcaaaatttggttttatttagttacatataatttaatgcaaagaaattctgttacttaatgttctgtttatttatgagtgcctatcaggaacactaataggaatgccattcaaccagtgtcttctgcccctctcccagctgttaaattagtacttcttcattggctttctgaaatgtcctgagtaaagtagaaaagcaacctttgtatggatgtggggatatttaatagtatgtatcttgtttcatttttttcctatgatgtattaatatttatttttctccaacccctgctccattttcttaaaatattttccagttaataactagttgctttatttcctagctgaagtgagaaaaccaacggaaaacaatacagatttgggcagaggagatagagttacatctttaaaggagtgagccagtcacccaggagaatcacatgtgtaactgatgtaggggtttaagtcttcatactttcactaaaatctgtctactaactctcccaccaacctttgcatcaaacacttaggtacctgcctgattaggggggcccctttaagggaaaaaacttttaaaaaattaaatgccttggttttgttttatcttctgggaaagaacacttttacttgattagcaagatgattatattatataacttgcccttaaaaacactccaaaatactgactccttttctccaattacaaatgagtgtgaagaaattctgttgtatgatttgaacactattaggtttgtatgtgtgtttaattggaagaattttatatagagtatctctgctgcttttgtttacctgggtaccacacaaccaaatacacattgagatttcaagaaatgatgatgaaagccagaaggccagaccacagctctgcagcctgtttcctacaaccagatataaaactctttctcgtcgccatgctgatagtcacactgaactagaactgtcccaacacattcttcctctctcataatggcttccatttaatacaggcaaagccctttaccttagcaaattctttatctttcaaaagtgaccaaaatgaggacttcaaccttggctgcacctcaataggagatgctgatcttgagttgtaatgagaaaagtgggcatataggagattttagtgactgcagtcagctgtctggcattcctttctcagtttgcatctaaaagactacatatgtcaagcttatctccacctgaatttgctgcctgctataaaaacatttcattaatatatcccattcttcctacctccatctctggtttgtcattagtggtattctgaaaagcttaagaaaaaagaatcattgagtagaaagtgaacattttaagttattttcctttttcattggcaattagttaacatgtaaaatcttttccattaaactgtataacttttaataactatatattatatatgggataaaatatatggactgaattgtgagaatataaatgcatcgaaagactctggtgtcatgaaagcacaagaataaggctggagatggtcccagatccaagatgtcccaaaagccttttgtatcagtttctctatttttggtattttgcataatgcatggatccttagttcaaatgagggacaaagtttctcagtcagccccacttcctttctttctaactcctacctttcccttgcagaggaggtagtagagattctggaattgtctatttttatgaattccattattttgtccatggcatctctaatgaaaacaggttctagaataaaggagttgattagtctgaacagtactaattaactacaaaataaacgttagtgatcagcctcttcctctataaacaatgaccaattagacgtttccgtaattccatgtattatgtatagtacactctataaatgtaaatgtaatgcttgtctaaaaagtgcaatttattgtacattgtcccaacaaatgtttacttttataatcgttatgaacttgaattggattagtatcttgtttttatgtgtgaatgaagccttgtgaaataaacaaatgcaactgagaaggtaacaaggtgactgtttttgtgagccagtgatgttttcaatgctttgtgttgcccctttggccccattaagcagtaataaacatttgttctgaagtcca

SEQ ID NO: 256 - protein, 424 aa, Homo Sapiens
MPVLNRPGDLSKFSGQQLEEGFEHNLSCSFGSPKVLNIVDKRSIFLILDTYLVLMEEGVPCPAPAAKLTPPVKKSQDMHDERSKLVNEYACRVLELLGMGHRLFVPRLLATSKEDLLQADFEGALKFFRVQLPKRYRAEENARRLMEQACNIKVPTKKLKKYEKEYQTMRESQLQQEDPMDRYKRENRRLQEASMRLEQENDDLAHELVTSKIALRNDLDQAEDKADVLNKELLLTKQRLVETEEEKRKQEEETAQLKEVFRKQLEKAEYEIKKTTAIIAEYKQICSQLSTRLEKQQAASKEELEVVKGKMMACKHCSDIFSKEGALKLAATGREDQGIETDDEKDSLKKQLREMELELAQTKLQLVEAKCKIQELEHQRGALMNEIQAAKNSWFSKTLNSIKTATGTQPLQPAPVTQPPKEST

SEQ ID NO: 257 - DNA, 22540 bp, Mus Musculus
  misc_feature (1)...(22540): n = A,T,C or G
gtggtgaattcttactctgttgggaaacacaggaacatttgtgagcaggaagtatgcctcccaagttcaagcgccacctaaatgatgatgacgtgaccgggtctgtgaaaagtgagagggtaagtttagactcttcagctttaaagaaactgagtgtaagtctcattccctgcagatgatagaagagcgtctgaaatgcatggaaacagaaacagggcagtcgttttcctctgcacctacagggtcctgcctgatgccccataataaagggaaggttaacagaggaaaactagaacatatttatttgttcatggttttattttatgtgacatgtgggcctttagattgaatatctaaaagcagggtgagtcggcccgtttttatgctgaggtttaatgaacatagacgactgtatggaagtgtaaggcaaagggtgtgatctaattacgtagagaaaggaggaggaagagaaactgtttcctcatttctccttggcctctgctccttccttcctgctggagatgggacagacagggtaggtcagagaatgcttttaatgatcagttcctaggtagaaaggtgggggcaatcagggcaatattttcaggttttatggccatttaaatgagatgtatacagttcagaggatcttggtattttagagttgggcagctactggcacagtcagttttaagacctatcagtgtctctgaaggagaccttgtcctccctgccagtcctccctgttccattcatccctttagccatggcgaggaagactcaagtgtgacttattctgaacattttataaaatgtaagtgaaatcgtaggttgtgtatcttattgtggttggtttctttgactcataaagtttgcaaaatttgtgaatattgtattagtaccttatattccttttatctaaatattgtatgtatataggtgttttgcctgcatgtgtgtctgcacaccatgtgtgtgcagtacccaggagagccataagagggctttagatcctctgaaactggagttacagaagatcgtgggccatcatgtaggtgctggggattcagcctggcttttctggaagagcaaccagtgttctaacttctgtgccatctaaccggtccctttatgtcattttcattgcttcttggaagatggtacattttgtaattgtctcacaaaaggttttacttggttatgtctttcagtggtttagaatattactaatattctttatgcgtgaacttaccaggatatcttttctccacaccccaccttactctttatttgacatttacattgggtgaatttcttgaaaaaaaaatattggctagactttgtggtattccggtcatataaaattttgattttaatagggtcattcatttaatgtcaataatactatcggactttctctgtgccagccgttcgcctatgggcagtgaataccctgtttcttatttttggctgactctttattatcatgtgaacttcagtttaagtttcatctctgcagaatgattttccacaacagtgtaaaccccatgtagtcacctgtcactttctgcccagtcgctgtttgaattctagccatgacatttgtctcaggattacccagtactttgaaagttgagacatagtacagctcccatattaaatgctcagtattaacaagtatttgttaatgaacatttcatagagccttcctttgttactctttagtatgtgttatatattgataattctacatagacatacaacatatattcatttcttctgttccctcacacttgtgccaaattggttatttttctcctcatcttttacctttccttggcacctctaggcaccttagtgatttaccctctttgttcttcttccctctgtttttcaaatattaactgactatttaagcagcaatatttaaataaactgatccacctttgctagtgtactttttttttcccttcctgccctcactcctcaccacacacatcagcacacacccacttcctcacatcgtcctcccacactcagcctcagaacttttaataggacagtcttaagctctcttggagacttcttttatgttatactttttattaacttattgtccacaatgactttatcgtctcttattttaatatttgtgtgtgtgaatgtaagcgtgctcacctgtatgtgtgcttgtgaggactaccagtcaacattaggtctcttcctctgttgccttcctcctcatttttgagacaaggtctctcgctgaccctggcacttgctgactgaggaggcttgctggccagagagcaccaaaggtcctcctgtttccatacctcagcactgtgggcagagatatgtgatgccacacatggctttaaaacatggaggctgagaatccaaactcgggtccttgtgcttatgagccacccctcaccccccaaatgtggttacaggtttgagtagatcctttaattagatcctctgtgtcttgtttgtttgtttgtttgtttgtttttcgagacagggtttctctgtgtagccctggctgtcctggaactctctgtgtagaccaggctggcctcaaactcagaaatctgcctgcctctgcctcccgagtgctgggattaaaggcgtctgccaccatgcctggctgattcttctgtgtcttaagacttatttgtggctggtctaattcttggaggagcaatgtcctcagaaaagatacatacgtgattgatttcccatttctgtagaagcaaattaccccaaagttaaagcatgacaaagctactattttatattctcttagggggaaattgctccttgagacaagctgcaagaggctccctgcctttcttggttcatacccttccttcatctttaatctcagtctcatagtgtctctttcttgcctccctcctctcttggaaaaaccattttccttagttgtggcttaaatgaaaaatcagtaaggaccttaagactcctcagttacccccgccaggtctcttttacctcacaagttaacagtcacaggttttggtattgggacttggatatctttggggcaccattactctgcctacaagatgtatattatctgtgtctgaaggtttagatttcgcttaattttaacctcctgttaggacctaatgctcttctttagagagatgcagcaccatctccatttcaagggagacttcctgtttgataatgtgaaactgtaaagttgccttgttggaaattagcatatatttcaggataagtatctagaaaagcctttatctctgccctaaggtcacccctttactcattctgtgtagcccttggactccacaattcagtgctgccaacagagcgggtggaggcaggaggaatggtaagattctgggattgaacgcattttctctggaagatcaacaaacaaggttccatttcttctagctgccacagaggcatctgtaatttactgttccctctttctggaagcttgtttttaagaaatgtgagcatgctagagtttgtagttcctctgtatctgaaaattcaaggccttttcatttcttaacagagaaatcttttggaagatgattcagatgaagaagaggacttttttctgtaagttaatttttttttaatccggtggttgtaattaacatacaaggaagtgcatctagttaaagtgttcatgtgagatttgctctgtgctaaaaataaatctttatagtatcatcaaaataaaggacgggcacacagttgcctagaccttccctggcgctctctgtaagctgttgctctcctgggctacactcctttctgtcacggcagagtttgttccctagggtttgatacaaatgaaacttatatgtcgtgcccccccccacacacacacctttttatacgtttcaagctggcttcatttacatgacctgcttattttgagatccgtctgtgggtcagtaggtcatggtttggggtaatattctattgtatgagtacctacagtccatgtgtccactcacttgtgtggtttaagtgctttctagatgttggctcaaacatacaaaactgttgtaaatgcttgtgtgcagatgagaacacaagccaaacccctagctaggcgtgaaggcttctgcacactcatatctgtgtcccaaagtgaccacaccacaactagagctttggtttgattgaagtcaattttatttacatatctacccattccttcccatccttccaacagggtctcactctgtagcccaggctgtcctccaactcagttaccactttgcctctgtttcccaaatattgggattatagatgtgtgccgttgtctgtctgtctgtctatcactctttctgtctttttctttctcacttttccctccctttccttcttcctctcctccctcccccatctctctttcctttatttccttgttacttcttatatcataaatactgtagtgaagaaataagccattatagtagatttaatttatgttttcttgcacaagcattatagtttggacttctgagttttgaccctttaggcattttaagttttatacattttatacattgctgaagtaagggtaaaggacttttttctggcatatgaccatctaatcattccagaaccttttaattaaaagattattctttcctattgagttaccttggtgtcttgctgcagttgtgaggaagactgcttattcagggctaggtatgtgtttaggaaggacaactttgctgcaggagtcttctggccaggcggtgtagagacacatggtcatgatggtcaacatgtcttctttctatcactctttttccttctcacactttccctccctctgcttctcccgctcctccctctgaacttatagggccccgaggaaaacactgtactggggaccttaagagtcccatacatacatccagcacttgggagtctctacctcatggttcaaacctcctgggataaagagcatatcaagccctcccagggtgactcttaaggtcccctagtacagtgtcttccttggggcccgagaagttcacagatgaagggccaagcctgtctgttgtccttggtgtcacagtgtggcccctgataaaggttttcaccacagtgctgagaagagctccaaggtagccaaagtcattatgcagcaggctcttccctgccagctccaggtgtgtggtaagtcctacgtgctcatcctgattaacctgtaaggagaatgctgctgagggaagatggaggcatctcttcaggccaacaggagacgcctaaccccttctcagcctgtctgaggactcagcccagggccagtgtcagtgctgtggcaatgttgggaaaaagctcagcttccctcttctgactcagtagctatagtcacagaccataattctgccctggtagcaccaagatttgtatctcacagacactgaagcagaaagtatcctgtccatttccaaccactgttcctctcaagcctcttggtttgtttggttttggtttttgtttgtttttctttttctgttgttaataaaaatattttgtgacaattccttgaaactgagtatgttgacagtgcctgtagttctagttatttgggaagtgggagattgcttgagcctaagtgtttaaaatttagaaattaaaaattaaataaaactgaagcccatgaagattgttgattaggctacaattctaatccgagagtgggaatcgtatcatttgggcagaaatatgagataaaatatggagatattttctatagttaacacgcagttggaatgtttggtttagttttgttttgggggtttttctacatagccctgactgtcctggaactcactgtgcagaccacactggcctcaaactcacagagatttcacctgcctctgcctccaaagggctatgagtaaaggtgagcacagctcttggagtggttttaacataattattattaagtaactacctcatctgtcacattctttttaatgactgcttttccatacttttctcttgatttattataatccctctgattcagaatataaaatattgtgctttgacttattatttggaatagaatgnnnnnnnnnnnnnnnnnnnngaattttggtgagaattgtactggctctgtagattgcctttcataatacagcaaataatctgaacacaggaagccttcttttgtttggtgttttctacagctcttcatccatgctttagagttttcagcatagggtctttcccatctttagttacatttatgaattcatgacttcaaagtgtactacagagccatagtagaacaccgttgtgctgagccaaaactagacacatagagaccaatggaatagaagacccagagggaaaataactctacacagtcacatccatcccattcctaataaaggtgtcaaaacatgcattagagaaatgctgcctctttaataaatggtgtgtgtggggacactgatatctacctgaggaagactgaaactgggtccctttctcctactgtgcacaaaagtcagttcaaaaatgagtctagccgggcgtggtggcgcacgcctttaatcccagcacttgggaggcagaggcaggtggatttctgagttcgaggccagcctggtctacaaagtgagttccaggacagccagggctgcacagagaaaccctgtctcgaaaaaccaaaaaaaaaaaaaaaaatgagtctaaagacctaagacgttggaactactagaggaaagcacagtgggagcatgtgcagagcaagagaggactggtggctttgcatcaaactaaagagctgtgcagcagatgaacagagtcagcaggacgggagaagatctttgccagctgctcccccaatgtgggattagtagccacattaaataaagaaggaatagcaaaaggcaggtaatctagttactgaaggacacttgtgaagaagtacacatagccaatacgttcccaaaaggaatgtacaccgtcttcagctgtcaaggaaatgtaaattaagactacattaagattttacctcagctgggcagtgtgggctcttgtcattatcccaactctcaggacgtagaggcaggtggacctctgagttggaggccaacctggtctacagagtaagctctaggacagtcagggatgcacagagaaaccttatctggtggtggggccgggggtggggnnnnnnnnnnnnnnnnnnnngttgattaggctacaattctaatccgagagtgggaatcgtatcatttgggcagaaatatgagataaaatatggagatattttctatagttaacacgcagttggaatgtttggtttagttttgttttgggggtttttctacatagccctgactgtcctggaactcactgtgcagaccacactggcctcaaactcacagagatttcacctgcctctgcctccaaagggctatgagtaaaggtgagcacagctcttggagtggttttaacataattattattaagtaactacctcatctgtcacattctttttaatgactgcttttccatgcttttctcttgatttattataatccctctgattcagaatataaaatattgtgctttgacttattatttggaatagaatgctggtctagaactctagtatttagttggagctctgaaaacctaaagggaaaaacttacagaagttatggcaacatgatattttcatactagtaaatggtattttaatgagtagtttgatttttttttctttcaaatacaatctcttacaaatgcatactttgacttcctttagaaagtttcatgtgtaataagaacctatgttgatttttttttttttagttttgtggtttataccttattctctatcttcagaaaaatattcatcaaaataccctgaagctcccattcctagaacattgaaatgggtagatcaaggtgttatatacacttaactataacaagataatattaggaacttgagactgttagatacttcctagttcctagtgttcttttttttttttttttttttttttggtttttcgagacagggtttctctgtgtagccctggctgtcctggaactcactctgtagaccaggctggcctcgaactcagaaatccgcctgcctctgcctcccaagtgctgggattaaaggcatgcaccaccacgccccggctggtcttttttttttttttttttcagatttacttattttaggtatatgagtacactgtagatgtcttcagacacaccagaagagggcgtcacgtgatctcattacagatggttgtgagccactatgtggttgctggggattgaactcaggacctctggaagaacagtcagtgctcttaactgctgagccatctttccagccccttcctagtgttcttgcattttcctctctctgtgtgggtatctctgtaaaaaaagatgttcaaaaatatacttcagatttttaaatttttagaataaattcgaagtgaattatatgttttagttcttgaattgaccatgaaggtattcatagtcacagttttattgatacgacatttcagagttttatgtagagaggagaaaatatcacttaagattaggattgtgtgctatgcagtagtggcgcatgtctttaaccccagaattttggaggcagaagcagggggatctatgagttcgagaccaccttgttctacagagcaagttgcaggacagacaaggctagacagagaaaccctatctcgaacaagcagattaggattatgtaatctgtaccttctcaggaagttttttaacacttggaagaattagattatggtcaatgacatgcaccatgaagtctatacatgattatgtagcattcatttctaccaacacctgtaaaatacagttttgtatgattaatgatgatccatatttagaatctagcttgattgcacacataggtgtaattctgtgctcatatttgtgaaatattgtcattactaatgtatactgcatgttttattttcagacggggaccatctggaccaagatttggacctagaaatgataaaattaagcagtaagttcctagatactcatttgttaaattgattgtcatagttctctgtagaccacagctaccagactacagtctatgaacagatctgcccattgtttttataaacaaaattgttttgattagaacagaggctatatctatttgtgtccatattatccattgctgttttttaactacagtagcagagatcatgacacaaaatgcctttagattcatattatatagaaaaagagagtggccagaggtgctatttcctgcaccgttgtctcacactgcagcaataataccaaaaggagccagtaactgcaattccagtttggaatcctgtgttacaagggaattgttgctagacttcagctaaatggattttattatagtctatatatgtagccttcagacacagcattcttcatcagtacctggaagctttaagaaactgtctaatgatggtcttgtaaagtacacatggagtagagtgaagctggcctcacaagccattatctcagggtcttagtggattcacaggacattctgcattgtgtatgagaatgtgcttgcaagggtgtctgtatgtaattgttaagccagagtgactatccatccacatcatgtatccatctctcatatctaaagtgtcaccggagtagagcaatctagagacatctgggttttttgttcagccagtatactttgtttccatctgaagtgcttctgcagaaatgaatctaatgtagactacggcccagtgtgtctttggagccacgcacaaatgatgtggatatggaaactattactgcaactttaacaatcacagaagattttaataagaaggaattattaagtgatgtagtggttcttactctagagctgaaggctggctggatttagttagaagtcagtcatcaaacgagccaattgtaccttgatggctgagtctcatgaacactaatctcacacaacatgactcaccagtgtgtacaacgtgacacactagccatgccacatgcttaaggaaaactccctgacattagtatatcaaattggttattttattcaactaagatgcattgttaccacttcatttataataattcagtagagtatttctcagctatataggtcagtaacattgtttggatatacataaaatacgtaattaaaaacaaccaaaaaaaaaaaaaaccctcttttgctcaacagtacctttaaagaccacaagatgggggtattaatggaaaattagtgttttctctataaaataaagaagaatgtgtgtgttgcagacatggatttttttcttttaatggaagagcattgacattatcaagtacatggctaagcattgcatgccgtgtaaagtgtttgaaagactatcacatttaattctcacaagtgagacaaactatcatcctcatttgaaaggtgagaaaatccaaggctgaaagagccttccttgcaagcagtattcacacatagtaagtgacaggctaaactgcaaagcagctcaaaaagtcaaaccccttcctctgtgtgtccgatgaccttttctagtcctgtatgatctaaggccgtgaagctgttttacctctctgtaagctgttttagttcttaatttcctttcagctgtggccatatctttctcccactcatctacatagcttctagatctaacagtcttcttctctttgctgtcctcaattctttgagccatattcaattcacccagttgaaataacccttcctcttacatatattctctagatagatccagtatctcccttaccatgccgaactcattcttttctaaaaaatttaagtatatattttaaaatatattttatgtatatgagtgttttgcctgcatgaatgtgtatgtaccatatacataactagtgcttgcagaattcagaacatggtgttagatcccctggaactgaagttagagatagttgtgagccactaagttggtggtaggaaccaaacctgggtcctttgtaaaagtaacaagtgctcttaactgctgagccatctcttcagctgccatacacacccccaattccttttttacccctcagaattgctttggatgtttagcttctttacttccatatgaatttagaaatgttttttccatttttgtgaagaatgtcattggaattttggtgagaattgtactggctctgtagattgcctttcataatacagcaaataatctctgaacacaggaagccttcttttgtttgctgttttctacagctcttcatccatgctttagagttttcagcatggggtctttcccatctttagttacatttatgaattcatgacttcaaagtgtactacagagccatagtagaacaccgttgtgctgagccaaaactaggcacatagagaccaatggaatagaagacccagagggaaaataactctacacagtcacgtccatcccattcctaatgaaggtgtcaaaacatgcactagagaaatgctgcctctttaataaatggtgtggggacactgatatctacctgaggaagactgaaactgggtccctttctcctactgtgcacaaaagtcagctcaaaaatgagtctaaagacctaagacgttggaactactagaggaaagcacagtgggagcatgtgcagagcaagactgatggctttgcatcaaaccaaagatctgtgcagcagaaggacagagtcagcaggacgggagaagatctttgccagctgctcccccaatgtgggattagtagccacattaaataaagaaggaatagcaaaaggcaggtaatctagttactgaaggacacttgtgaagaagtacacatagccaatacgttcccaaaaggaatgtacaccgtcttcagctgtcaaggaaatgtaaattaagactacattaagattttacctcagctgggcagtgtgggctcttgtcattatcccaactctcaggacgtagaggcaggtggacctctgagttggaggccaacctggtctacagagtaagctctaggacagtcagggatgcacagagaaaccttatctggtggtggggccnnnnnnnnnnnnnnnnnnnnctggtggctttgcatcaaactaaagagctgtgcagcagatgaacagagtcagcaggacgggagaagatctttgccagctgctcccccaatgtgggattagtagccacattaaataaagaaggaatagcaaaaggcaggtaatctagttactgaaggacacttgtgaagaagtacacatagccaatacgttcccaaaaggaatgtacaccgtcttcagctgtcaagggaaatgtaaattaagactacattaagattttacctcagctgggcagtgtgggctcttgtcattatcccaactctcaggacgtagaggcaggtggacctctgagtttggaggccaacctggtctacagagtaagctctaggacagtcagggatgcacagagaaaccttatctggtggtggggccggggtgggggggagacaaggatagctgtggggggcagtggtaagggattccttcacactagtcagaatggctgttgctaagaaaaagaaaagacaaatatttaagaagattcaggaaaaaaagaaatcctgacatacagctggtaaaaatgtaaattactccagccaatacagacatcaatgtagaagttcctgggggaaaaagttaaaagttaccctacacatctggacacccacctgcagcccagtagtggacaggcaggacaggaaaatcagaagtccagatgtgacctcaaccaagtaagttctgagtttgaggcaagcttggattgcctaagaccctatctttaaaaaaaaaaaaattcttaaaaccttgaaaattgtatgaaaactcatgctctagctgtgttccttctgggtgtgaacaccccctcctgccctccagaaaacccctccgaggccatctagcacagagaggtgtgtggtgtctttcatcacagcctccgtaagagcaaagttatggggccagcctaggcgcccatcagcaagtggagttgcagggttcctctgtgtgtgtagccttggctgttctggaatgcactctgtagactaggctggcctgaattcacagagatcctcctgtcgctgcctcctgagttctgggactaaaggcatgcaccaccacacctggcagcaaatgaattttgattcagatgtgaagaagaataaataacatttacagaaaagtgggaggaactgggggttactgtgttaagttatatatgtatgttatgttatcctaaagacaatgccacatgtttcttgtgtggagtctggtgggtgaaatggacacaggtaggaggagaataggaatgagagaaggcagggagagagggtgaaaatagacagtacaggggatggatatgctcaaagtgcactcaagaaaaagtcatatccaaacctatttcattggggaaaggtggggggtgccaggggttgctgcagtttgccttgacccatggagtcttttgcttacagcagtttggacacatgactatttcttcaatcttttggttttattttaaaatcatgtatagtatggcacattaatatccataataactataatctgtcagattgtgtgtagcagccacagaatattttgttcatttctgtcttactagtcaacatttgtgtaatatacagatgactacctgaaaatgtcacgactgcccaggcttaccccagactcatatgtagctgaggataaccctgaatgcctggtcctcctcttccattcaaatactaggtctaggtggacagcaacatacctgtgaatatttttaatttttttttccagaacgtccacattgatttctgtattggctatgttaatttacattcccaccaatagtataagggttcgccttactgcattcgcaccagcatttgctgtgagcacagacttgctctcatttttagtggttagagggtttcctgtcactgctttacagctctctagatactaggtcatttttacacaccctaagtgttaacttacccaacacagacatttacagtactccaccataagcctgtggtcagtaaatccataggcactctcacttcctgctcagtccctaaatgaaaaaaacaaaaaaacaaaaaaaaaaaaaaaacggtgtgactgaactggctgtgtttagctttaggattaataaagtgtgttagttgtacatgtgagtagttacataaatattcatgccactgttctttagtagaataaacatcttttgtcctctgtttggataattggatatacatctcttggagattcagcaggcatgtcagatctttatgcacatccctgcttggttgagctagctagccttacagccttcagtagaataatgtgtggatggagaactctgggaagctgtgatgaatcctgaagactgtagataattcatgggtatatgtaatgtttctaacgtaggtgagagatgagctgatcagtcatagtaattgctcctaaaatgtgatggcactgcctctacatcacctatgtctgagtgggccctcaccttgtttttaaagcaccgaccttgactagctcaaataaaggatagtgcacttttttcataattgtgtatgactgggctaatttgcggggaatagtgtaggacaggacggatgatctctctctctctctctctctctctcacacacacacacacacacacacacacacacacacacacatacacatacccacaatgacaaatacatattcttatttgcttaaatatatgtgggtttctatgtgtatatagttgctaatagttattatgctttacacattttttgagttataaggaccagagattcactttatttatctttttatatatttcttatttaatgtttcttatttaaatattattatataaagtaatttaagatagatatttgtctatggatagaacatcagaggaatactagacatgcaagtatgtctgtgtttttgtaggaggtaactcctaaatgacagatagctgagaacatctgactaattcttcagcttgtttcagttttcattaaccactctgagtgtgattagaagaggctcccatcacataaggaggagaacatcttcatttatacactgaattgttttgttttgtttttgcctattagtgagcatttcccaatattctttggtgctccaagttgtcttgaatcttgcctaggctgaagagaaaactaatgagcactgaagagttacatccattgggtatcctgtggctcagaggggtgctgtacgtttccattttgggaactagctatttctcattagccttcagtaaacccggtgaagcacgtggtaagtcttgtggctggagtgcgttgcagaggaaggtggactctgattactagttttaactagtctttcactactttactgacaagaagatgaaacatttagagtcacactgagcattctgtcagtgtctggtttgcttgtgagctacattgaagatagaatcaagactaaaaataagctgtcagttaagtattactttaaagtgtatcttttgtccttaattacttggctattcagacccagaaatggaagaacgctgcttacttttatagtttaatgacaactctcagttctctgagaatttgccacatctagtaaaagttctaaaagtgtggggttttctaaaagaagaataaatgttaccttttttttcaaactagtgttcagaatcaggtggatgaagttattgatgtaatgcaagagaatattacaaaggtaattgaaagaggagagaggctggatgaactacaggacaaatcaggtacagccactcgctgcccttcttgatgttgtgactgtgtgtagctaatgcttactttccgtttgtctgatcgcccacccgcccgtgttcaggaatcgtggcttccgagatcaacattcagttcttaagctggatttccatggcttagtttctgcccattaatgtaaattattgtactgtttacttcttactgagacaagaatggagagtttaaaacttcgttgccaaaaagttaaatcctcttttctcttgccctgtcatattgatgcactttgtgtttcttcggatgtcaagatgttaaaatctaatccattttttttagtactccttttaaacttgcctgctatttctatttagtcttccctggtactcaggtagtctgtattttcccacagatgttagtctctgtgcccatgattcctagcacacttggacctcgcgtattgtttggatgatgacttacgcttccctggaaacttagcaactgttgtttacaggcagatgttagtctgagcctgtaatggctcttggcacatgttagcccttcttgctgtgttaatggtgaatagctgtatgccagattcattcttgatagatttgcttgatttttttttttcactcaaaatcagttatctttgttttctaaaaattaaaatttttttttgtgtgcaaattttttctagagatgtgccaaagtatttattttgtttctggtgtgggatctagtgtgtacatcagggatctgcccatgggcagcatccccagcccctaatttaaaaacttttattacattaattgtgtgcatgtggaagctagggacttgactctgtccttccatcacgtggggctctttgtgtcaaacttaggtcgtcaggctctgtgtccagcttatttttaaactcttattttcttaccagaactaagttcgtggataagaagagttctggaaatcatgagtgggtgtcagggtgagggtgggagagttgacaaactgaccttccactgtgttttcctttgttttgtttgtttgtttgtttgttttaatggagactgacagactctgtgggaaccaaattttaagaagtagtattactgtttatctttgtatgactatataaaagaatgctgttatgtcatttaatccttctctctaccctgtgtgatatagaaagcttatcggataatgccaccgctttcagcaacagatccaaacagcttcgaaggcaaatgtggtggcgtggatgcaaagtaagtgaggggtgggggaggggcagcgaggcagcagcgagtctctgagcttgtgaggacaaacactggaagggccttgcccaaagcttcctcccctaggaaacaggagcagggcagtgcctgaaaggctgcactcagctctcaccatcaaagggccctgcgttggtagggattcagcatctggacacgtggtgacaaacacgtgcccttcttagacccacttccacttcttcctagctcttggagaacagttcactgtgtacagagtgggtttgaatttggtgttttgttttttgttttctgatgagaatgaaaatttgaggaaagtgtgattttgttttattttcatagtgggaaaaacagtagcagtttgtatgccagagactctcctaacaaaagattaaggaaaaagactcattttattccttcataattaaattttaataaggacaaatggaatcactgcatactaatatttctgcagaaatgaatttctctcttaaatatgaacaatcatgaaaaatatcttgatttttcaaaaacaattatgtcatgagaacaagtgtttcctttttcatcttgaatctaggtatgtgtttttattttgccaaaatccttaaacatggatttattgtttttaacccctcattttagggttcagcaataattttctaaacccaactttgctatatggtaaggatctcttcgaaaacatgtcttcgaagagaaaacatgaaacatgatttacctgtgaaatattctgttcccagaaatagaagtgaaggaggacaagtttcattgttctcttcacaatgaatttttttcccatttatttttgtttgcttcagagaataaattttgtattttctttcatttcttcttctttgcctcctcctctaatgttttaaagagatttaaatatatataggatggttttttaaacaggcaaggccttagtttaactttgtggaccacggatagcatccagcatctaataaacagcattatatcagtagcaagtgcctcctccctaagggttctgtttcttcagtctcctcctacactatcagtcacggtgttcctgctcatctggggaggtgccccaggcctcctattttttggattgactttcatcgtagtgatttaggaaggctattataaaaaaggagattggaaaaaaagatatcagaggctgccactgggggaagggtgtggggtggtaatgggctgccgctgataatgaaagagctttgagcagtggtaggactgtgtctgtctatgacagtgttagatagatgggcgctgccccaagttagaaacccgaggacgagcagacgtttcagtacaggctctttacacttttcttgatatttccatttccattttgtaaagttcagcctagtaattttatattaataggacacattaatatatgttttaggaaagctactcttaaattccatgttatttagaaaatatttttaggttaaataaagaattgaagtatattttagtgtaagctcaggttcaagactttttatatttttaagttataattaaaaacctgggcttttatatctaaattccaaagctttttgtatattccttgcgtgactttgttggtgtcacggctacaatgtcacgaagtgttagcagtcagtctatgtttaaaacatttaattcctagaatttaacatttaattcactagaatgaatcagccttttatgatattgaatatactgattttttaaaatttttcaaatgaaccttataaaatcttggaaataaaaataaatcacacacaaaattaggcaatatatcttgatggccttgtgtgtagttagaacagccactctgaagctgtggaggctcacacactggacttcactctttcatggtctagtacattcttatgcactggtccactagaacagtgacttattttaagactggctgccctgaacgcagagatttccagtgagttccctgccccgagtgttgggagtaaaggcatgatcactcgtgcctggcagccacagccatttttagttatgtacaatgaaaatggtgaacgaaagcaaggcttttgattcatcaaggagataaaattagtttatataatgtatgattttaaaagacaatacaatggtgattgtggcagttccatgtagaaagataacatgagcttaaagtgtcaagcggctgactacagtgtgatcttaaggcttctccttctcacgtgaaattgtccatactctcaagttatttaagtataattattcataaagaaaatgtagtcctaaaaatggcgattaaaacattgtgaaggaagtaagctgagataacaactctcgggtactcagaaaactgccatggcacctgctgccgtgtgtaactgtcccccatggagcctgatgccatattgatagcagtccctgctccatggttgtttgccatattgtctatattgttgcttatccacagtgagctgtgaactatttatcatggcttttagaagagaaccaccaaattcattttgccttactatacactcattccattttgctgttggttattagtctcttctatataatttatcaatttattatcatagattgcctatatagggacaactccatgtagaggatttggtatgatccatgggttcaggcattcatggggcgagagcacatttatagggaacataactgcagataagacaggaccatttacataaataatacatggcctgtggtttctcatctagtcctgagtggaggaactgcagaaagtacagttgtgtgtctcacattagaagcaggcccagccctgggaaggcgtctgttggctgcttactgtatagtacagcctcaggtagtgacatccaacacaacagttttggctatttatacaagaatacagaacaaccatcatgttcatgtgagaagtagagaattggacccctctcagtgaatgtgcctgtttattaatgaagctgtggagactagtaagtagcagaacagatagtcttgtctgtattaacacgtcaactctttcatttgcctttttgtgtgttctagataaaagccatcatggctttggctgcagcgatccttttgctaatgattatcagtaagtatttactggatcactgtttcttgggctattgtgttttgtaaggtttagggtttaatttggtcttgattttttttgtcccagagacatagtctcactatgtagcccaggctgtcctagatgccactatgtagctcaggttggcctctggctagggtattgtgttaaaaatcagtttaattccttttaattttagttaacctaatatatggaatttcaacgttgaataatggcatgacttgactaaggagccaaccttttacctagaatctgtcaatctctgaaaaatgcttttaaaatgtataacttatgtgattatgtgtgcatttctgtagggagtctataagttttgttagattctcaaaggatactccctctcctgcccctcagccacacccaagacacagcacaaaactcagctggtcttttttttaatttatttttttaaggctaaatctggtaagtattatacttgggaccaaaatacaattttctgtttattgttgtatttgagagacaaacccagttaatttcttcagatgattttatatgtgtgcatatagatttgaactgaattttagttctgaaagtataactccttctctgattttctttaatattcttttcaaagtcagatcattttttgtaagtacctttcttcaaggtctcttatgtttacagagattttatgaagaactagaaaattgaaactagaaaaattgaaaatttttatgactattttttaaaagagaattttataaagaaatacaatctagtgtcatcatctaggttattgtgtgaatttgttctctagttgcagtgtatttgtaagccctgtgttagtgctcacgttacttccatagtcatgtgcagatgcattcagagcgagaagaatttcgactcccttgacccacaggtttctagctggggtcaaatgcagatctgcctttttatttcagctttcattgcatcaccaatgtctttttcgtagactgcatggtccacacatatgttgactttatggtttaagatggaccgcaaggatagtctagaaatgctgtccccattactaagtgtcagctggctgtgatccgccttaacagaaagtgtgtgggttagggagtgctcaggcatgagctgcagtgctacttactggccttgacttcacggtaatgtttaattgatgatatctattaaacatgatgccttttaacagaaacacttaagacaagattgcgtattaataagtgtagtagccagaggctcatgggaacttaaccctgtatttttcctaggaatattgctcagtattcaccatattcattcatgataacttggtagaacagataacaagatggataccatgcaaaatgcagacgagcataaaaaggactatacagtccactgtactctcacgatggcgctagctgctgtcaatataattattatactaacagaactagattaataaaagtatatgctttcagtcttttcctattgatacgtaagcatgattttcaaaagctaagatcacatccgttatttctaatattatatgcattatgttcctatattgttaaatgtggaaatatttttactgttttgtcatagtttatttgctcaagaggcctgtgttagacagctgtgttgttgatgacattttttgcattcttcttatttcatagttgttgttttagctccgagtctggccctcatttctcctttagtggccaacgcgtgcgcttagggctgtgcttctgcctcagtgtgacccggttctgattctcatgcattctttttcttttttgttcttttctctctttctctctcttttttttgttttgttttacttttttctcttacagttcttatagttgtgaaattccgtacttgatttgatgacagagaccctcattaaacaagatctgggacaataatatttaaagattgctgcataatgtaaatgaaacctatgtatagaactttcaaatttcctttttcaagaaactaaaaggcaagtaccaattcaaattggagcattgagaatatcgaatgatcacctttccaactaacaaaatgcattttgaataattatatttgatgtagaaatatctctattttgctttattccaaggatctaatttgaaactagatacttgccagtctgttatttgtatatatagttgaaccctgatgacaatgccccatac

SEQ ID NO: 258 - DNA, 1342 bp, Mus Musculus
gggacagacagggtaggtcagagaatgcttttaatgatcagttcctaggtagaaaggtgggggcaatcagggcaatattttcaggttttatggccatttaaatgagatgtatacagttcagaggatcttggtattttagagttgggcagctactggcacagtcagttttaagacctatcagtgtctctgaaggagaccttgtcctccctgccagtcctccctgttccattcatccctttagccatggcgaggaagactcaagtgtgacttattctgaacattttataaaatagaaatcttttggaagatgattcagatgaagaagaggacttttttctacggggaccatctggaccaagatttggacctagaaatgataaaattaagcatgttcagaatcaggtggatgaagttattgatgtaatgcaagagaatattacaaaggtaattgaaagaggagagaggctggatgaactacaggacaaatcagaaagcttatcggataatgccaccgctttcagcaacagatccaaacagcttcgaaggcaaatgtggtggcgtggatgcaaaataaaagccatcatggctttggctgcagcgatccttttgctaatgattatcattcttatagttgtgaaattccgtacttgatttgatgacagagaccctcattaaacaagatctgggacaataatatttaaagattgctgcataatgtaaatgaaacctatgtatagaactttcaaatttcctttttcaagaaactaaaaggcaagtaccaattcaaattggagcattgagaatatcgaatgatcacctttccaactaacaaaatgcattttgaataattatatttgatgtagaaatatctctattttgctttattccaaggatctaatttgaaactagatacttgccagtctgttatttgtatatatagttgaaccctgatgacaatgccccatacttgtgtttcagttgcattaaagacattattgcatctaagtgagagtcagtctggtgaccaggaagcctatgtagagtcctgactctttgctgcaagagatgcataaccatcctatcagtatttgcaagaatgccattcttttcatattgtagttgctttgcaggcaatttccacacttatggattaacaaaagctaagtgttgtaaatgtttctgccttcagctctacccgaaaacattccagtaaacctattctgactgtataagaaaatacgtggtaattttttggtctttggattttgaaaatgggaaatttaaacagtgtgaaaatcataatatggtcctataaaactggagataataaaatttttgaaga

SEQ ID NO: 259 - protein, 75 aa, Mus Musculus
MQENITKVIERGERLDELQDKSESLSDNATAFSNRSKQLRRQMWWRGCKIKAIMALAAAILLLMIIILIVVKFRT

SEQ ID NO: 260 - DNA, 1420 bp, Mus Musculus
agcgggggcgctgcagcagagcggagcggtggcggctctgcgccttcggccttccccctcccacccttcttcctccgcttcccgctccctcccccgcctgccctgcgctgccagcagggactgctgccgggagcccatcggagaccgcaggtggtgaattcttactctgttgggaaacacaggaacatttgtgagcaggaagtatgcctcccaagttcaagcgccacctaaatgatgatgacgtgaccgggtctgtgaaaagtgagaggagaaatcttttggaagatgattcagatgaagaagaggacttttttctacggggaccatctggaccaagatttggacctagaaatgataaaattaagcatgttcagaatcaggtggatgaagttattgatgtaatgcaagagaatattacaaaggtaattgaaagaggagagaggctggatgaactacaggacaaatcagaaagcttatcggataatgccaccgctttcagcaacagatccaaacagcttcgaaggcaaatgtggtggcgtggatgcaaaataaaagccatcatggctttggctgcagcgatccttttgctaatgattatcattcttatagttgtgaaattccgtacttgatttgatgacagagaccctcattaaacaagatctgggacaataatatttaaagattgctgcataatgtaaatgaaacctatgtatagaactttcaaatttcctttttcaagaaactaaaaggcaagtaccaattcaaattggagcattgagaatatcgaatgatcacctttccaactaacaaaatgcattttgaataattatatttgatgtagaaatatctctattttgctttattccaaggatctaatttgaaactagatacttgccagtctgttatttgtatatatagttgaaccctgatgacaatgccccatacttgtgtttcagttgcattaaagacattattgcatctaagtgagagtcagtctggtgaccaggaagcctatgtagagtcctgactctttgctgcaagagatgcataaccatcctatcagtatttgcaagaatgccattcttttcatattgtagttgctttgcaggcaatttccacacttatggattaacaaaagctaagtgttgtaaatgtttctgccttcagctctacccgaaaacattccagtaaacctattctgactgtataagaaaatacgtggtaattttttggtctttggattttgaaaatgggaaatttaaacagtgtgaaaatcataatatggtcctataaaactggagataataaaatttttgaagaatgtcattggagtgtttgaaaacgagcactatgtagctcccagtcttggtccagttggttgtcagttaaactacaataaaaagggactaattctgacgtg

SEQ ID NO: 261 - protein, 141 aa, Mus Musculus
MPPKFKRHLNDDDVTGSVKSERRNLLEDDSDEEEDFFLRGPSGPRFGPRNDKIKHVQNQVDEVIDVMQENITKVIERGERLDELQDKSESLSDNATAFSNRSKQLRRQMWWRGCKIKAIMALAAAILLLMIIILIVVKFRT

SEQ ID NO: 262 - DNA, 2534 bp, Mus Musculus
cccctgcctaccgcccccaacgtccgctggggctgggaaccggcctgcgcgagggtggtgaattcttactctgttgggaaacacaggaacatttgtgagcaggaagtatgcctcccaagttcaagcgccacctaaatgatgatgacgtgaccgggtctgtgaaaagtgagaggagaaatcttttggaagatgattcagatgaagaagaggacttttttctacggggaccatctggaccaagatttggacctagaaatgataaaattaagcatgttcagaatcaggtggatgaagttattgatgtaatgcaagagaatattacaaaggtaattgaaagaggagagaggctggatgaactacaggacaaatcagaaagcttatcggataatgccaccgctttcagcaacagatccaaacagcttcgaaggcaaatgtggtggcgtggatgcaaaataaaagccatcatggctttggctgcagcgatccttttgctaatgattatcactcagatcatcctgcacttgaaaaaatgaagttttaccaccatcaaaactatcactatttaacaacagtgaagatcaacagaaaaattcaagtagctttgctaatgttagttgatgcccagtgaaatcaggtcaccactgccgtgcctgatgcgtgcccctgtggtttttctgtaacagaagcctctcccttgcagcagtttgtgatgaatgggttcctcctccatcataacccagtgttagtgttgcctgtggtctttttattcctttgtcctaacaaaactcattgggaaatgtcccaaaagtttataagctgggaaatttattgattaagagaaggtccagtgctgatgatggaacattgtttaaaatggagaaagggtagcacacatcagttgcagaggtgcctgtgatggggttcctgtagactctcattacagtccactctgggttctgtgttagaaagtaatgccattctgatagcagcaaccggcacctttctgttctgtatggcatgtgggtgccctcagatgtgataagagcctgacctctgtccttgtcacttaacacctgttctgtgtgctgtcggcactgtagaccaaacagacttgtatttacatctcatagatattttatggctagaaaatatgcaagaagtttttttagtgttgaaaacaaatgtcattatatgttcttagttgtattgagtcagagtgttacgaagttaggaactggactactaatcagattttgtgttttctcacagaaatgttatcagagtcacttttacttctctgtgagtgatagtaagagcatgactcagtctaaacacatgaaggtgggggttgtcaaataacagcagaaaggcagtggctcagaagacacagaaaggggccatcttagtccatacaaatgtgccttcccttagactgacagggtctgagtttatcttgtatgtcttggttcttttggttggttggttggttggttggttggttggttttatttggttttggttttggctttagttttgtttgtttgtttgtttgtttggattttttttgttttttttttgagatacggtcttactgtgtgacccagactgacctcagatgcacacagagccatcagcctcccacatgctgggattagaggtatgtgccaccacacccttcagcccttttctttttgatcaaagaattcctgggctcaagttatctttccagcttagcctcagaagtagctacaactacatgtgggcgccagcttgggcaggtgagccttttctttaagcctgatgttagtctcacttggatatttaccttcttatgtcaagcagaataagggtggaacacgcttttcttctggctcttgtttattttacaaggctacttaggttagcagggatgggaagaaaaacattgctaatccagttgggataaacgtacgtttgagcttataaagcaaggaccacaccacgttgtgtctctcagctgcaatccctgtgtgtatggctgtgccccagaagtcacaccgtgctggtggtgaataagtgagggctgatttccagtgtgtgccaagaagtaacatgattgaggtaggtgaacctagagataaaagagttcttatgatttagtattgaaaaaattctggttttacgatgttgcattcgattcttttcacttgaaaagtcatgttttaaagctgtaaattgcctatgtctaaggatttagtaaaatgtcagagatcaatctataagaaaattcaaacattgtttttatatcttagtagtatgtcattattttagacctcacaatccctaatttaaccatttcggcaagtgcctttgacacatacggagtattatgggagatgagcaaatgtagtgccacaccccgtttcccggcttctcaatgcctcgtgatggtatatgtttaacagtgctgcacagttcagttctttgtgttcatacgagattgtattgtagcctttccatagcaaacagcaaaataaaccattttgcagaaaatg

SEQ ID NO: 263 - protein, 141 aa, Mus Musculus
MPPKFKRHLNDDDVTGSVKSERRNLLEDDSDEEEDFFLRGPSGPRFGPRNDKIKHVQNQVDEVIDVMQENITKVIERGERLDELQDKSESLSDNATAFSNRSKQLRRQMWWRGCKIKAIMALAAAILLLMIITQIILHLKK

SEQ ID NO: 264 - DNA, 41916 bp, Homo Sapiens
ggccgccgagcgccgatcggctcgatgagcggaggcgctgctgcggcgctgcggccgacgccgggtccgcaccaactgtctccccctcccagcttcttacctcggcttcctactccttcccccgcccgcccagcaccgccagcccgggagagctgccgggagttccccgggagcctcaggtactggcgctggcctgttcgcagcgggaggggctggtgtgaggaggaaggaaacgaagaagacgcccctgccttgccgccccccgacgtcctagtcgggctggtcggcgggcctcggggatctaggaagggaccccggagtgggaaaaggttggggccgggggtgccgtgaggaaggaagacgaggacaggggtatgcggacgaggagcagttgagggagagaagaattggaattgaggggtactctggggtgatgggaagagaacagtaccatggatggggaaggtttgttaagagtgggatgtagtgaggaattccagggggtacaatggggcaggaagggccagcgttaggagcagatatatcgtgggacgtggcctggtgtgacagattgggtgtggggggtgaacggagctgcctgaaattgtgtatttaaagggcccgggggaaagagcgccaaccctgctgtgtttataatgaccggaaggtgggggtgaatcgttacacttgacaggttttgcaaataatatctccggtctgtgtccatccaagtcactttatttctgtgaaactgcatcaagcaagaaggctgatgacagacaaggaagacgaatcagaaagagaatggaggctgggaaaaggagagcctttgcccagattcaaagctattgactagataacgtactacttacaaaaacgcacacatagacatttaagtatatgctgatgtataagaagcatacggtgatgtgactcatttgagtgaattgtatagtggtggtctatcctcaatgtggaagtacatgatggctctcttatttacatgtatacctagtcacaaacagctgaattcacatgtctttttttgtaggagaaatcttaggcagactatatcctagtctactttctgagcatgatttatttctactagttgtttgatacacatatcagttactaataatcagttgcaaataacatcaaagttcatcaaggtagctaattaatctgcctactgctttgctgatgggctatttgttgcacatggtttcttgggattaagagacctgaatatggtgtttgctcatccttaagattgtagttttactgtatgtcttataaaggcattatataagtctgcccgttgtttgctttgggatgttgaggcagcctcattgcaggggttaaaatctaaatacagataatagttaaaagcacaagttcttcagtaatttgccttgtcatctgtttttccatgcattctgttacatttctgcatgaatgaagtattctgacatcaaagtatgaggaataaaagggccagatgtatgtgacagaaatattgtggaaccaagaactcaagagctgttactcaggcagcaagaatttggtttttgttacaagtgaataatttctgatttggaagcatttcttatcaaagaaaagtgtgtcctttggttttgacaagcagctgacttaaaacattacttttatttggttcgtgaagccagatcctgggattattcttttttaagtgtatatcattaacaaacaaactgatgtctaactatacctaatttaaaggtctaagtgtttcttcttatggaaaaggaagcaggactattgggttgttagcaggaagtgagtctttctagaacagaattctgtaaacctgatgggcaactaattgaacaaatgattaaaactgataatgcacagccattgattaatttaggcctgtatctctgctgtttcaatgaatgtagtgactaacgttatcgttactaaactttagttttctcctagtttcttggtgcctactttaaagaagcatcataaagagtaaaagaaaatgcatgtgtatcactgagcaccgtgcctagcacatagtaaaacattcagtatttctgagctatcctgaattgatgggtattcatctaccatctagtcaaaaatactgaaaattcattatttgcatagaagaactttttcgcaaaaaaaaattttagtatgttgcatacacaagcattttcctggaaagtcacaatgcatattagcatataacaggatgtgagtcattctgtagcaaagaaaactagctttgtttaatccagttgttttgatagaaaaaaattgagtttctcctattctctctcaacacagacccccaaaagatttctcctcacaagcaaggaggaaattctgcagcagattctccagctgggtgtcctctaattcaattctgatactgtatacctagagatagcatcagatcctgcaggttgagggcttaatcctacaagattccccccacttcaggtgccaatcacaagttccaggttgttttacctgtgtttccaactgactggctataaatcagagttcccacaatcccttccttgtgttcagtttatttgctagagtggcttacagaattaagagaaacactttgtttactggtttattataaaggatagagatcaacagccagatggaagaggtgcatagggcaaggggtacagagcttctgtgccctctccaggtgtgccaccgtccaggaactctctacttgttcagcttttgggaagctctctgaaccctgtcctttttgggttttatggagtcttccttagtaggcatgattgattacatcattggctattagaaatcagttcaaccttgagccctcctccccttccaggaagctagggggtggggctgtaaagtcccagtcttctaatcatgcctaggtttttctgtgaccagcctccatctggaatctatctgggggctaagctaccagtcatcttattagcatacacaagacacatcactgcagcgattccaaggatatgtcaggaaatggggattaagaccaaatgagtatattttgtaaatcacgatatcacaccagtacttaccaaacttaccccttttcatggagtaccaatgggacattatagtttgcagaatatttttgcatgtattatccaatttgaccgtcccaactctgcagaagcctgaaaatcagtattttacacctgaggaaactgaatcattgcttaagcaaccaactaaaagtgagagaaataggcatgttctcctgtcttctgactccaactttaaattgtaaagcatttaatgtctcagtgagacgtcctccctctactctctgctctttcattttataaaaatcttaaatcactcatatcctacacatgttctcttagggcaattacatccattttctcataattttaactatttcttaggtgttgaggtctagcatggaggccccagtcactggagtggaacaagtgagagggcaggaattgaagtcagaaaaatgagggagtccctgtcatacagggtttcatgtacactgttttaagtacattagcttatgccccaaagtctcaaatctgatgaaatttattttctctttaaggtggtgactatcctgttgagaagcaaaagatactttgcaagtaaaaaatatgcctcccaagtttaagcgccacctcaatgatgatgatgtcacaggttctgtgaaaagtgaaagggtaagttcggaatcttaagctttaaaaacaaaagattcaaaatatgttttcattccctttgtgaataatagaagaaaaaccatccgggcgtggttgctcatgcctgcaatcgccgcacttgggacgctgaagcagaatagcttgagcccagaagttcaagactgtcttggacaacccagggagaccctgtctctataaataatttttaaaaaattagtggggcatggtagcacatgcctatggttccagctattcaagaggctaaggcaggaggatcacctgagcctgggagatgaaggctgtggtgaactgtgatctgcactccagcctgagcaacagagcaagaccctgtctcaaaaattaattaactaataataataacaacagaaaaatcaaaagcttatgactatattctaatcctaattgttttcttcatagcaaatgtatttaaaaacatgttacttagattggtgacaactgaattctacttccattattgatcaaatcattattctcatagcttctttctagtttttgaaagggagttttatacaaatacacaatatcttattcagaactttgaatgtatttggaatttttcagattttagaaagttaagaacatattatgtaacagcatttttggggcctggaccagtgcctccaaaaatattaatatttctcagtgaagtctatatttagttatatctaactaactatgtaaataaagtgtgtaaataaactagctaacatcagttcaggtcaaattttcctccaaaactttttgattttcagaagcttttagattttggaattgcaaataaaggtccccagacctgtaattatcttatgttccagagtatcttttatataatgcttcaatttctagtttattccagaacattctatgcaaatatatataaatctagaaattatgccgcatttaaaagacaacattttatatgaatgttgtaggcagattacttttagaataagtactcaatacatatttattgggggaaataattcacgttcttatttttttaatgcaccattctgaagccctccttcctttccttcttgtcttgattcattcaacaaatatgtattgaccacctcctatgtgctaggcactgggctaaaaattggaagacatagtctgtgcccttgcaaagcttttagtctgctttgttttacatgctctttttggacaacctcagaacttcatattatccactctgtccaccatcttatgacttttagtcataagtttcttttagtacaacacaggaaacattttcttccccttattctaaccctttgtacagcttttgcggttttgtgtgtttctgatggtttgtttttattttttgagaccagggtctcgctctgtcattgaggctgaagtgcagtggtgcaatcacagctcactgcagcctccaccttttgggcccaagctatcctcccaccccagcctcctgagtagcaaagactacaggtgcatgatatcatgcccagctagtttttgtttttctcgtaaagatggggttttgccgtgttgcccaggctggtctcaaattcctgagctcaagtaatccacctgccttggcctcccaaagtgctgggattacagacatttgacactgcactcggcctgttttgttttgttttgttttgttttgttttgttttgttttgttttttaatggggaaatagaatccaccaatagattaattgctagcaagcttttactaataaactttaaggagtcaccaatgatttccatgttgccaaatccagttactccttctttgccataatttcaactgcttactagcatttggtgcagtttcaaccattttggtcacctatcttttcctccatgccatggtgaaactcttagtgtctgcttgagctagttccccatgcaaggaattgagaaatgccttgaaatataccaagtctgggtgaacccggaaggctctggccgagagaaggcagaggatgatcagggattgagaaatcactcagggataatccagggtctctttctttaatgtaatatctttcaagataaacctccaagaaaaagtgattcagaaaatttgatatacctgtgctggaattccatacactgaagatttactatcaaaagcatgtcttggccaggcgtggtggctcgcgcctgtaatcccagcactttgggaggccgaggcgggcagatcacttgaggtcaggaattcaagaccagtctggccaacatagtgaaaccccatctctagcagaagtacaaaaattagccaggtgcggtggtgcacacctgtaatcccagctacctgggaggctgaggcaggagaattgcttgaatctgggaggcagaggttgcagtgagccgagattgtgccattgcactccagcttgggtgacagagtgaaattccatctcagaaagaaaaaaaaagcatgtctttacaaagcagaaggtttggcgaaatactaaacccattcagagaataaatgtcaatttgttaaagtaaatgataccaattgtgaacctataaaggaacccagtgtaaaacaacacagacttgatatgcatccagtaaaagctgactgaaagctcctgatgaatattcagtgatcagcgtgcacaaagcatgctgaaatattttttaaatcatcggttagaagaatctgagcctctttcctattgccccaaggaaatctttagtcacttacccagagatgcttgcaaagcattaatatcctggaagatgatcaataaatgctgacagttgattgactgatatctgagatatgtcaggtaaatacctcagtcctggacagagagcccctaagtcacatctgcctttgtgtaagatgaagactgaagtatggaaatgtatgtagtaaaatcacctctcggaacttgtttgtaattcatacaatctatgtcaattttgaaaaatgtatgtaaagcagagaaggttgtagccaaattcaatgtatagtatgcaagagtatattatttaataatttttaattgatgcaaatcccattaattttatagttttatttttacatgattttaaactgaaactatttatatttcctaagttcccctgtgtttctttctcacaatcactgctgaacgtaaatttgttgttcacttaatggaatcactgttaaggacacagtcacttgaatatgattgctttttaaaaatcaagtccaggcgtgatatactaggatcacagtttcatggcatgttggtcataatcctgagaaaatagtgacaaaattattatttgtagatattaaataccagtttaataatatgtgtggaaatcagattaaatagtacataaagcccaccctaataacaagggcaggaaaaattacttcaagaaaaacaatagtaaaccttaaattaaaaataatacaaataaataagctttatgaatacatttttaaatttaaaatgtattgtctcaataaattccactgctgagactgtaattgtatcactttctccttatattcttcattgattattagtatattagacaccagaactgaataaaattgactgtttcaagagaactcctttttgatgtttattatattatgaagtttgataactgattggttagaataatatataaattacttttaaaatcttttaaaagttttgttcctctttcctattatacttttttggtaatagctttattgagataaaagtcacgtaccatacaattcacccacttaaagtgtacaattcagtgagttttattatattcacagagttgtgcaacaatcaccacaatcaattttaggatattttcattagcccaaaaagaaatgctgtgcccttttgcagtcatctcccattttctttatcccctcagcctctaagcaactgcactcctatagatttgtctattctggacgttttctgtaaatggaatcatataacatatagccttttgtgactggcttctttgacttagcataatgtttttaagattcctcaacgttatagtgcatatcagtgcttcatttttttttttttttttttttgagacggagtctccctctgttgcccaggctggagtccaatggtgcgatctcggctcactgcaacctccacctcctgggttcaagtgattttcgtgcctcagcctcccaagtagctgggattacaggcgtacaccaccacgcccagctaatttttgtatttttagtagagatggggttccaccatgttggccaggctagtctcgaactcctgacctcaggtgattcacccacctcggcctcccaaagtgctgggagatcttcattcctttttattgctaataatattcccttatattgatataacacatttggtttgcccatttatcagttcatagatgtttgggtttttttctacttttggctattttaaatactactgctatgagcattagcataccagtttttgtttgagcatgtttttatttctctttggtgtatacctaaaggtagaattgctgagtattgtagtaactctctgttcagccttctgaagaactgcccagctgttttccaaagtggttgtacaatttttacattctcaccggcaatgtatgatgattctaatttctccacatcctcaccaacacttaatattatctgcctagtgggtatgaaatattatctcattgtgtcctattattcttttttgacactgtatccctagcacttgtgtttattcaattaatatatgaaaaagcattggttttcatgtgtgtttctcagtgtacaattatagtaaacatatctttagtatcattatcctctaaaccaaataaattattactattactattatcattattattttgagacagggtctggctttgtcacccaggctggaatgcagtggcacgatcagggttctgcagcctcctcctgggctcaagcaatccccccaagtagccttcagagtagctggtattacaggcatacaccaccacgcctaattttttttttttttttttttttttttgtagagatggggtttcaccgtattgcccaggctggtttcgaactccggggctcaagtgatcctccctcctcatcttcccaaagtgccagggttacaggcgtgagccaccatgcccggccataaaccaaatacattatattataaatgtaatgcttgtctgttacttgttagctagaatattactcaagaaatatttatttaaaaaatgacctaatgcatttccttgaatattaattggttttgaacatttcatgtggtcattggccatttcttctattgggaattatctatttctattctttgtttttctataatgtctctttttcttactagtttgtcaaagctttttatataatacagacatcaggtcttttgtcttaaaggatactgcagatgttttttcccagtctgttgcttgttttttaaccttgtttttgatgtcttatgttcaagttttaaatttttatataatcaaatatgttaatctttttctttcagacttctggagttgtgtgttgtttaggaataacttacccatcttaagagttaactatttatatattttcaatctttgtgatttcataacaaaatatgtctaaggtcccattttcctttaagtactgctgtggccatactcttcagattttgacctgtgatcttcccagtgtctttcatttcaaaatagtctaatcacctttatttacatttaacataaaagttaatgagaaggatgttttttgttttttgtgaggttttttgctacagggtctccttttgtcacccaggttggagtgcagtggcatgatcatagctcactctaacctcaaattcctgggcttaaaagatcctcccatatcagcctgctgaatagctaggactacaggcatgagccaccatgcctggctaattaaattttttttttttttttttttttcccatagagacacggtcttgctatgttgccagtgctggtcttgaactcctgggctcaagtgatccccccactttggcctcccaaagtgctgggattacaggtgtgagccactgcacccagctgagaagagtattttaaaacttcctttttccatcgcattatggtcagagaatatgacttgtgtaatttctattttttggaatttattaaatgtcctttgtggcttacccataaaggaaaataaaataaaatttgctgtctagtttcaaagttctagatttttttgtgtgtttggcttctccatctctgaagggtatgttaaatcctccctatgattttgatgtaactgtttctcataatttgcgcagcttctgtaagatactttaagctatattattaggtatttaaacattcgttgctattaaatcttcttgatggattgtatattttattattgtaaaatcatcttatttgattgtttaatactttgtcctaaaattcctctttatattgctaactgtaacattctttttgttagaatttgctgatgtttcttttctacccctgcttttccccatcctttatttggtatttgttttaggtgaatttcttgcaaacagatattggctagaatttttttgaaccctaatcacatatagtttttgttattaaatagggacattcaaaccagtcacatttattgtgaataactaatacacttggactttttctgtgccagccatctagtcctgcagcaatgaatgctcttcaccctgatctttggctggctctttgttatttggatctcagcttaaatttcacctcttcagagtgattttttatgacagcctaatctcatgtagtcaccccatcactttctgtcccatcactgttttaattctctgcatagcatttgttgcaatcctgttttttttattattattattatactttaagttttagggtacgtgtgcacaacgtgcaggttagttacatatgtatacatgtgccatgttggtgtgctgcacccattaacttgtcatttaacattaggtatatctcctaatgctatcactcccccttctccccaccccacaacaggccccggtgtgtgatgttccccttcctgtgtccatgtgttctcattgttcaattgcaatcctgtttttctgtgagagctcagatttgttttgttcaaaaccgctgcttagtacttagaacagtgcacatagaagcacgtaaaagatacacaaaaatacttgttaaatgaatattgaatacatccttcttcttcttctttttttgtttttttgtatttttagtagagacagagtttcaccatgttagccaggatggtctcgatctcctaacctcgtgatccacccgcctgggcctcccaaagtgctgggattacaggcgtgagccactgcgcccagccgaatacatccttctttcatttttttactctttagtatatgtcatatattatacatagatatagtgatattcattgtatttcttatattttccttttcccttatgccttttcttatggtagattcccttatgccttcccttatgctagattgattatttttactcatctccctccttgcccccagaaccaccatatctaaaccacagtttagatactttactcccttccccctccttccctctctcttttgttactaactttatattttaatggtagtgttaatctgtgttctctgtcaacataccaaaaactaaggcccttccattgttttactttttaattctagtcctgttcccccttcctccattccactcctcatcaagatgagcatattggcaatgctttcacttcttcacttcactctcccactcccagcttctgggctttgttggaaaagttttagattctttttaagcttttctatataatatgtatttttttcaaaagctttaacttattgtttacagtcacattatcatcaactatttagatttgaccacacattgtattagattcattgattgtatcatccatctcagtcttaaggtctttgttttgatttcattttctttttggctggtgtaattccttgaggaatttcctcaggaaaagtacatgggtagtgtattagtttcccattgctactgctacaaattaccacacacttaaaacaacacaaatttattgtcttatggttctggtgaccagaagtctaaaatgagcttatagggctaaaatcaaggtgccagtagggctatgttctttctggaggctttagggaagaaactgttttcttgcttttcctagctcctagaggctgtttacctttttaggctcataccccttcctgtgtcttcaaaaccattagtgtaatgtctgtctgtctctgtctgtctgtctctctctctctccctcactctgcatggggcccatatgaataattcataatgatcttttcttctcaagatccgtgatcacatctgcaaagtcccttttaccatgcaaggtaacacattcacaggttttggtgactgtattagccaggtgtggtggcatgcgcctgtagtcccagctacttaggaggctaaggcgggagaatcacttgaacccgggaggtggaggttgcagtgagccgagattgcaccactgcactccagcctgtgcagcagagcaagactccatctcaaaccaaacaaacaaaaaacaggtttttgtgattaggaaatgaacatctttggggagctattattctgcctatagcaagtggtacagtttgagcatccctaatctgaaaatccaaaatgctcccaaatctgaaacttttttaagtaccagcatgatgccacaatggaaaattccacacctgacctcatgttgcagtcaaaacgcagtcaaaactttgtttcatgcacaaaggtattaaaaaatattgtgtgaaattacccttaggctatgtatataagctatatttgaaactcaaggtctttatgaagcataatgaattttgtgttgagacttcggtcccatccccaagatgtttccttatatatatgcaaatattctaaaatccaaaatttgaaatacttctggtcccaagcatttaggataagggattcttaacttgtatactgtttgagttcttgtgtgtctgaaaaggtctgggttttgctcttctttagtcaccttttggactttatacccaccccttttggggagaaggtgagactgtcctcattttaaggaaaattgttgtatgttataaaagtctaaagttgcttttgtttggaagttcaaatttgtttagggggctgtttgtgggtagagtagctaaaaagtagaacatgcccatttttaagcccttgtcctcagctccaaactccctctatactcttctctgatgctgcagttggaatccacaaactgtatttcttctttccacctggttccctaagttctgccagtagacagacactggcagtcagaaggaaggagaggggacttgctccctcctgactacctgcagttcctcactcccataccagcttcagtgacctttctaccttttttagtcagttataggattctataattatgagcattttctttgcaaagtctataaatgttgtcccacatcttttagcttccagtgaaggatatgtaattacttttccctctttatggacacctggagttaagaaatttcactagtataggacttatttcattactcctctgtgacattttataagccctctgaatctgaaaactcaagtctttttctttttttgacagagaaatcttttggaagatgattcagatgaagaagaggacttttttctgtaagtttttttttacagctttattagggtgtaattgacatacaatacatgcatatatctaaaatatactgtatacattttgacagatatgcagtagtctcccttatacgtgagagatgccttccaagatcccccagtggatatgtgaaaacacagagagtagcacgttgtgacataacgttaggtactattgacctctgatgatatgtcagaaggagaatcatctatttcaggtgaccttggatcatgaagccaagaagatgttgataactaaagggctgggtagtatatacaatgtggatatgcaggacaaaggggtgattcacatttcaggtgggacaaagcggggcaatgtgaggtttcatcatgctactcagaatggtgcacaatttaaaacttatgaattgtttatttctggaattttccatttaatattttcagaccgcagttgaccatgggtaactgaaactgtggaaagcaaaaccatgggtgagagagagcttactgtaccgtgtacctgtgacatcatcaccaaaatcaaataatgaaccatctgtcgccctgcaagtttcctcataacccttgataatccattgctctcccagtccctaggcaaccagtgctctgctttctgtcactgtagtttgtatttctaaaattttttataaatgaaatcatgcagtatgccccctttttaaaacctggctttattcagcatggtttttgagattcatccatgtgttaatagttgggttttttaattttctgagtagtattccattgtatgatgctgcagttcgtttatgcattcacttatgtgtggatttttgggttgtttctactttttggcttttacatataaagctgttataaacatttgtgtgcaggtttttgtgtggatatatgctattatttctcttggaaataaaaatacctaggagtagaatggttggtgtaagtttacaattgttttccaaagtggttgcaccattttatattgtcaccagcattgtatgagaattccagttgctccatatcctcgtcattacatatggtcagtctttttcagcctctttcattctagccattctagtggatgtgtagtggtatcttgttgtggttttaatttgcatttccttaatgacatatgatgttgaacatctagtagtgtgcttatttttcgtcctcttaccttctttggtgaagtatgtgttcaaatcttgcccattttaaaatttttctcattgagttgtgtttttttggcttttttttttttttttttttgagacaaggtattacttttgcccaggttggtagagtgtcctggcgcagtcttggctcaccacagcttcaaactactgggctcaaatgatcttctcgcctcagcctcccaagtagctgggactacgggtgtgtgccatcacacccaactaattattatatttatttatattttgcagagatgaggtctcactttgtttcccaggctggtctcaaactcctggcctcaactgatcctcccacctcagccttccaaagtgctgggattacaaggatgagccactgtgcctggccaagagtttttatatattcaagatacaagttttctgtcagatatgtgttctgaaaatatttactacaaatctataacttaaccctttcattttgtaataatatcttttgaagattaaaattttgattttgatggcatcagtttattgaattttttttcctattgtttttgctatttttttcatatataagaaatctttcccaaactcaaggtcactaagatttttacctgtactttcttctaggagttttatagttttgacttttatatttaggcctacaatccctttttaagttaatttttgtatatatttgaggtaaggatgaaactgggggaatatggccatccaactgtttcattgtaatttgataaaaagatcatcctttccccactgaattaccttggtatctcataaaaaattagttgacctgatcaatcctttgtagttatgattagaaagagctctcagacaggtctaggtttatatttggcaagtcaggaaggacaacattgttgtgggagttttctctggggattgatgtagaaggttatatgcctgagaggaaacatttacctcttaccttgttaaaatactgtgacttggctgggtgcagtggctcacgcctgtaatcccacctctttgggaggccgaggcgggcggatcacaaggtcaggagttcaagaccagcctggccaacatagtgaaaccccgtctccactaaaaatacaaaaattagccaggcatggtggcacatgcctatagacccagctacttgggagactgaggcaggagaatcgcttgaacccaggagttggaggttgcagtgagccaagattgcaccactgcactccagcttgggcaacagagtgatacttcgccccccccaaaaaaaaatgtgactttttttgttgaggctgggtttttttccaagtgaaaacattttataaaaattaacggaaacctggccaggcacagtggctcacgcctgtaatcccagcactttgggagaccgaggcaggtggatcacctgaggtcaggagttcgagaccagcctggccaacacagtgaaacgtctctgctgaaaatacaaaaattagccagtcctggtggtgtgcacctgtaatcccagcaactcagggggttaaggcaggagaaacacttgaacctgggaggcggaggttgcagtgagccaagatcacgccactgcattctagcctgggcgacagagaaagactccatctaaaaaaaaaaaaaattaatggaaacccgagaagcagtgaagaaagagcttacaggatagatagcagcaaatccagtaacagaaaatagtatcatttttggcagaatgtcagataatgtggggagataattttctatgggtgacaagattgctatagagtcacaaagtgaattgcctacaatgctacttgtggtgaaaagccttagactagagcaatagctacccctcaaaaaggaactcattttttttaattgtttgctgattgattgattgactgagacagggtctcattatgttggccaggctggtcttgaactcctgacctcaagtgattctcctgcctcaggtcccctaccagagtagctagaattaatagcacaagcctctacacccaggaactcactattgaatacataaatggaatttattcagccttaaaaagtttggaaggaaattctgacatatgctaaaacatggatgaaccttgaagactttatgataagtaaaagaagccagtcataaaaggaaaaatattgcatgattccacttatatgaggtacctagagtagtcaatttcatagaaacacaaaatagaatggtgtttgccagggcttttgaggaaaagggaatgacaagttaggggacagagtttcagttttgaaagatgaaaaagttctagagatgaatggtgatgacagttcattaagtgaattacttaatgccacagaactgtatgcttaaaaacggttaaaatagtaaatatatgttatatatatttaccacaataaaaatttattgactatatatgtgtggctctatttctggactctatgtgtctttcttacatcaataccatagtaatcactatcctgagtactacgactttatagtaagttgtgaggtagtgtagtgtatatccttcaactttgcactgccttttgaaagttcttttggctattggaggctctaagcattttcatataaattttagaatcatcttgtcagtttccagcaagcctgctagaattttggttgagattatattgaacctatagatgaatttggggataattaacatcttaacaatatttggttttctgacccatgagcatagtatatctttttatttatttgggtacttaatttctctcagcagtgttttgtagttttcagtgtccagatgttgtatttttttctttgtcaaattgatccttaagtattttcttttattttttattattatactttaagttctagggtacatgtgcacagtgtgcaggtttgttacatatgtatgcatgtgccatgttggtgtgctgcaccagttaactcatcatttacattagatatatctcctaatgctatccctcctccctccccccaccccatgacaggacccggtgtgtgatgttccccaccctgtgtccaagtgttctcattgttcagttcccacctatgagtgagaacatgcggtgtttggttgtctgtctttgcgatagtttgctcagaatgatggtttccagcttcatccatgtccctacaaaggacatgaactcatccttttttatggctgcgtagtattccatggtgtatatgtgccacattttcttaatccagtctgtcactgatggacatttgggttggttccaagtctttgctattgtgaatagtgccacaataaacatatgtgtgcatgtgtctttatagcagcatgatttataatccgttgtgggaagtcagcgaccccgaatggagggactggctgaagccatggcagaagagcataaattgtgaagatttcatggacatttattggttccccaatttaatacttttataatttcttacacctgtctttattgcaatctctgaacataaattgtgaagatttcatggacatttatcacttccccagtcaatactcttgtgatttcctgtgcctgtctttactttaatctcttaatcccgtcatcttcgtaagctgaggatgtatgtcgcctcaggaccctgtgatgattgcattaactgcacaaattgtttgtaaagcatgtgtgtttaaacaatatgaaatctggtcaccttgaaaaaagaacaggataacagcgatgttcagggaacaagggagataaccattaggtctgactgcctgaaagctgggcagaacagagccatatttctcttcttacaaaagcaaataggagaaatatcactgaattctttttctcagcaaggaacagtcctgagaaagagaatgcattcctaggggaggtttctaaaatggctgctctgggaatgtgtgtcttatatgttgcagataagggatgaaataagccctggtctcccaggcctattagaacgaggaaattcctgcccagtaaattttagtcagaccagttgtctgctctcaaaccctgtctcctgataagatgttatcaatgacagtgcgtgcccgaaacttcattagcaattttaattttgccccagtcgtgtgatcttgctctgcccccatttgccttgtgatattttattgccttgtgaagcatgtgatctctataatccacaccctattagtacactccctcccctttgaaaatcacaacaaaatcttgctggttttgcggcgtaggggggcatcacagaacctgccgacacgtgatgtctcccccagacacacagttttaaaatttctctcttttgtagtctttccctttattactcagaccagccgacacttagggaaaatagaaaaggtcctatgttgaattatcgggggtggttcccttgatataatcctttgggtatatgcccagtaatgggatggctgggtcaaatggtatttctagttctagatccctgaggaatcgcacactgacttccacaatggttgaactagtttacactcccatcaacagtgtaaaagcgttcctgtttctccacatcctctccagcacctgttgtttcctgactttttaatgatcgccattctaactggtgtgagatggtatcttattgtggttttgatttgcatttctctgatggtcagtgatgatgagcattttttcatgtgtctgttggctgcataaatgtcttcttttgagaagtgtctgttcatatccttcgcccactttttgatggggttgtttgattttttcttgtaaatttctttacgttctttgtagattctggatactagccctttgtcagatgggtagattgtaaaaattttctcccattctgtaggttgcctgttcactctgatggtagtttcttttgctgtgcagaagctctttagtttaatgagatcccatttgtcaattttggcttttgttgacattgcttttggtgttttattcatgaaatccttgcccatgcctatgtcctgaatgatattgcctaggttttcttctagggtttttatggttttaggtttaacatttaagtctttaatccatcttgaattaatttttgtataaggtgtaaggaagggatccagtttcagctttctacatatggctagccagttttcccagcaccatttattaaatagggattcctttccctatttcttgtttttgtcaggtttgtcaaagatcagatggttgtagatgtctggtattatttctgagggcactattctgttccattggtctatatctctgttttggtaccagtaccatgctgttttggttactgtagccttgtagtatagtttgaagtcaggtagcgtgacgcctccaactttgttcttttggcttaggattgtcttggcaatgtgggctcttttttggttccatatgaactttaaagtagttttttccaattctgtgaagaaagtcattggtagcttgatggggatggcactgaatctataaattaccttgggcagtatggccattttcacaatattgattcttcctatccatgagcatggaatgttcttccatttgtttgtgtcctcttttatttcgttgagcagtggtttgtagttctccttgaagaggtccttcacatccattgtaagttggatgcctaggtattttattctctttgaagcaattgtgaatgggagttcactcatgatttggctttctgtttgtctgttattggtgtataggaatgcttgtgatttttgcacattgattttcataatttctgatgctactaaaaatgacatttcagatggtgtttcaaaattttaaaatgtcatacttattgctagtataaatatcattttgtaaattaaccttgtattctacaatcttgccaaacccacttagttttagtagtgtttttatatatcctactggattttcaacatagaacaattatgctttctgcaaataaagacagttttatttcctcctcgtctatgtttgccttttattttttattagcttattgctctgattagaacatccagcacaatattgagtagaggtggtgagagggaatatccttgctttgttcctgatctcctttaggggaagcattcatctttcatattatgtttcattttcattgcatgttgttactgttgttgtgtgtagatttatcaggttgaagaagtttcctcctattcctagtttgtgaagagtttttatcattagctgacgttggattttgtcaagcatttattttgtatctattgagatgatcattttttttggtctgtgaatgtgttgaattatgttgattttgaaattttaaaccgtcgttgcatttgtgatatgaaccctacttggtcatcatgtattattcttttaaaacattgttagaatcaatttgttaagagtttgttaagaatttttgcatctatgttcattagaggtattggttggttgatagttatgtctttttcttgttgtgtctttatctggttttcgtggtaggttcatactggccctggataatgagttgggaaagttctgtcttttttagttttccagaatagtttgcatagaattcttattttttcttcattaaatgtttggtagaattgacaactgaacaaatctagtcctggaattttctttgggggattttttaaaaataattttagacccacagaagggttgcatagatagtatagagagttcctatctacgcttcacttagcttctgttaataaatcttatataaccatggtacatttgtctgtagtgatgttcactcttccattcctgttactaatttatgccttctttctttttttcctaatcagtctggctagaagtttatcaagttttaattttcaaagaaccagcttttcattttgtgtttttctataagtattttgaagtctcatgttacttgatagatgaaacagacatagctcctgctttttttttaacctgtagtggggatcattttaattcagtacttttcagattctatttcactttatagtttcctcatttaatgactgcttttctttgtttttcggttgaccagctcttgtaagttcttgcctagtttttaggaatggcctctggttcagaatattagttttctctatgaaattcaatgtttaacatcactttggaatggaatactgttccagtattctgaggcttagttggagcttaaaagactttaaggaaaaagcttagaggaactaaggcaagatgatatattcacacttatacattatgttaaataagtttcagtaaacagtttttttttccaaaatttttttatcaattgctgtattttttcacctcctttagaaattgccatgtctagaaatctaagaacctggtttcttttgagttttgtagtttatgtcttatttattctgtatctccggaagaatcatgattactttaaataaccaaatgttttcatttcaagaatattaaaatggattggttaaggtgtgatatacactcaactacaataaggagataataatctgagtaatgttaaaattttcttaatatcttgcatttcccttttgctatgttgataagtttaagatgaataatcaaaaacatacttaaaattgttagtgttttcaatgaatttttctctatatccatctttgtcaatcggcagttcactttgtagtttcctcatttcattatagtctaaattcaagatgaattgcgcttttagttctacagttgaccataaagatattaatattcactagcagttaagtagttaggatatttcagagtttaatgatcagaacaaattctgtgtaagtttgttatataagataatataaaccctaatttctctgaaagttttaacatgcagaagaattagcttaattgtggctagtaataagtgccaatgaagtaaagacatgattacctattattcagtttcaccagtatcagtaaaatgtggtcccttatgataaataactgatccatgtttagagttcagcttgattgtttgtatttgtgtatactttctatcttttttttgttttgttttaatcctgtcactactaatatgtacttggtatgtacttgttttcagaaggggaccatctggaccaagatttggacctagaaatgataaaattaagcagtaagttttgttcatttgtttaaatgataatcatatttctgtgtagactagagattggcaaactgcagcctgtgagccaaatctggctgcagcctgtttttgtaaataaagttttattggaacatagccatgcccatttgttttcatattatcgataggtactttcaagctacaatggcaaagttgagtagttgtgacaaagctgtgtcacattttatggcccacaaaatctaaaatatctgctgagtgtctggtcctttacagaaaaagttgttgacccctgatgaagactaaatataactgctgggttataaaaacctaattcattttattttctcagaattatagctaaggaaatgcaggattgttggtttttttatgacttgattaccttatgtcaaatccatttatttagcatagtctgaaggtctattttggttttaaatctgtagcttgattcctattttcagaatgataacaaaggtaatataatagctttaatttgttgatgtactgcatgtttttatctacttccagaattttttcatatctcttatttatcataacccatatattgaactaagttttatggctaatttgtggtttaaaacctttgaggtatatattatttggtgatagatgagtataatatgctgtaatcaatgtgtctgatatcggaaagatatgagtcctgactggaggggagaaggaatagacagagcagtgagtcacttgagggaaggctctggaaactgaccaagctgtaaagactaactgtggaatgtgaactgcatggcccaggttcaagacctaaggagggataatagtcactaccctaagcctgggtatagatggcacattgtgggaagggttctataatgaagtatctagttattggtgagatacttgggctttactcaggtagctgttggtgtgaagaaatatttccatacttagcctaattctaactaatggattttgagatatggaaccaaagaaccaataaatgattacaggtactagactgggtgtattagttttctattgccatgtaacaaattaccataaacttagcagcttaaaacaacacacatttatcatctcacagtttccttgggtcaggagttcaggcacttcttaggtgagccttttgctcaggtttaacaagatggcaatcagggtatcaccaggtatgaccaactcaggaagttatcagaatttatttcctgcagctatagatgtcatggtgcttctttgaggccagtagaagagagaatctgtactgtttcaagtctcttatttgactaaagatacaacaagccacttttagatgcaatttattacttatatagtaaaaggaagagtagccaaagttagtagctctcagggtcattgtcctgcacaccaaaaataatgatacagctgggtgcagtgtttcacgcctgtaatcccagcactttgggattctccttcaaaggaggattgtttgaagccaaaagttttgagaccagcctgagcaacaaagtgaaacccccttctcttaaaaaaaaaaggggaggtcaatggctgcagtacaaattgtgggatactctattgcaaaggagctatttctaggctgtggtttttatagtctgcacatagagcctgcagaaagtttataccgcatcagaacctgggaggtgataagaaactgccttatgatagtctcataagggaaacagggaggtggatggaagaagacctcatgagccactcattctctcatgttccagggagatcacaagcattctaccaggactcaaattagctgtagttcaagcctgtgtggcatatgtggatgccaatgtgtaatgtctgaaccattctcctgcactgagccagaatgacttctttatccactcacatgttctcttttgcctaagctgccactggagaagaggcctccactgatgacacacctattttttgtcctgccagtatgctctgtttcctgtctgatatccttctgaagagtgaacctagtaagggatgttgccgattggggtcttttgagtatgattttccagctgaatccccaaaccaccaccagttgtacagagtaggcattaaagaatatatgtctatgttaatgaatgccaaacatacacacatgaatttgtatatttatgtattacactattaatatcacaataactttggtgatcacagaattttagaatagtaagggattgttaagtatagcgttttttactctagagctgaaagcttgctggatttagttagaataaggtcgttcatcaagcatgcattaaaccttgattaatgcttatctaagcagggcatgactcaccagtgtgcccaagatggaggagcacaacttgccacacaacttacccaatgacaaatccctggcgttattttagtacccaaaattgctagcactggtcagtttctttacttaagctgttatcaccacttaatttataacatttcaatacagagtgtttcctactgcatagattagcaacatcattgctttctttgaacttcattagccacatttattagtgttgataacagattaatcctacaaaaaatacttgacatcacttcttaggaaagactctttttgaggacaatttttaaatattcatatgtctacataaaatttatgcttctctttggaatgtttcctttgctttttaaattttgttttgtttttaaagagagtttgttcaaacataaattatgaggatggaccacctggaaataccagctccaaaggaatggagtcagcattccagagtagagaagttaaggtttcatttatataagcagacaggaacttttagcaggattacatttcctttgcctttaaattaaacaatagcattataaatgccactgtagtgaattgtagacattctgtgttaggagtagggaatctcccaattatagtcttggtcagaccagcttaacttttatgagattccctccccgacaccccagggaatgttccatggtgtaacagcaatatatatgtagttgcaaaaatacagcttaactttaaaacttcttttgtcagcagtaccttaaaagaccagaagatggggatattaactatgaaaataaatattttctttcagggatttttgctttgtttgttttttgaaacagggttttgctccatcacccaggctagagtgcagtggcacagtcacagctcactgcagcctcaaaatcctgggctcaattgatccttccacctcagctcctgagtaactggaaacttcaggcacgtgccaccatgcttggctaatttcttatagagacggggtttccctatgttgcccagactggtctcaaactcctggactcaagggatcctcccacttcagtctcccagaatgctaggattgcaggtgtgagccactgcacctggccagtgttttctttataaaataaggggtgcgtattgcagagcatgaatttgtttcttaatcgaagggcactgacatttatcaagtatgtgctatgtgttgggcactatgctaagtgtttgaataacactatctcatttaattctcacaagtaaagtagagattatcagctgcattttaaaggtgagaaaatgttaggctaaaacaggcttccaaggtgaattccaaagtcacatacgtagtaagggataaagttgtattgcaaacccaggtttgtctgaatacagaacccaggggctctacattataccatacagcttctctgttggtaattagaatagagccatttcagaaatacaggtgccgtcagactctaagaggatttaaaacagtattggaaatgtcttttcctcattgtgttctctctcatgtcttttattatcttatatgaatagcctttaactggccatgatataaaaatctccacccttccttcagaaactagcttttcctttgcgttcttaattttttattttagttaatagccatcgtctactaccagttaattgctcaaattataaatctaggagttgtctactcttttcccaattccttcacccacatccagttaatctcctagttcttaaaatattacctcctctgacatatatttccttatcctagaactttctcaccatccactgcctcttttactctgcctgattaactcttgactcctcaaaactcagcacaggggtcttgatgtcatctctggtccaggctgaattcatcaaggctacatgactgatactatgggcttccttctattatatcccttaacacatggtagtatatggatatcagttttccctactggagtataatctttctaaataccaggctcataaccttcatgatgataaccttgatgaatagcataataataactttttttttcttagacacaggttctcactcttgtcacccaggctggagtgcagtggtatagtcttggctcactgtagcctccacctcccggaggaggatcctcccacctcagcttcctgagcagctgagactacaggtgcacaccaccatgctcggctaatttttgtattttttgtagagacagggttttgccatgttggcgagtctggtctcaaactcctgggctcaagcgatcctcctgcctcagcctcccaaagtgctgggattacagccctgagccaccacacctagccataactttttaatgttttttgaatgaatgatatatttaattcagatttgaaaatatttgttaaatgcttactttgtaccagccacatttcacttgacctgggaaattaaagaataagtgggttagtctctgtttttaaggcatttatagtataacaatggggacaagaccaatgtgaaatacaaatagaaatcaaaggactataactattgtgaaaatgtaaaagatcatggggaagtatgttatcacttgctttgtaaaccaaactatctccatattaaagtaaataagcagatcattttctttcttctacaaaaattgtgttctgggtagggaaacatcctgaaacacaaaaacaatcatgagattttacatcattgagtgaaggttacatagtagctggattcagagtgttacaccagcagataattaatgtgtgaaggacaaagcagcaataactcactaatagtgtagcagaaaaattaaaatatttgcggtttccattatcaatagtgatttattacatgtgtgccatgttgttgagggaatacttgtaggtttatgatactctagtaagaatctagaattttattggttctgtcccaattaatctgcctatatccatggaatcttatccttaaagggttatgttttttttcctttgagacagatctctattgctaaggctgaagtgcagtggtgcaatcacagttcactgcaccttaacctcctgggctcaaggaaatctcccaccgcagcctcccaagtggctaggaccacaggcacatgccaccataaccagcttatttttaaatttttttgtaaagacaagggctcactctgttgcctagcctggtctcaaactcccaggctcaggggatccttccaccttggcctcccaaagtgttgagattacaggcatgaaccaccaggcctggcctttaaagagattctgggaccataattattttattagctttttgttttcattttaaaagtatatataatgtctacggccataccaccctgaatgcgcccgatctcgtctaagagtacgtatagtatacatatattaatatccataatagctataatctgatcgtgtataggagccttagtacattttattcattcccttcctgctatagcaccctactttaagccattaattatcgtcacttgcatatgacaaaaaaaaaaagctggctgggaatttcaaaattgatccttgatgaacagtagctttgcttttgtttgtagttaaatggagggctctacagtcactgctttatatctcctcctcaagtagctggatatgctttataggatttatactcaaactgttcatttatttagcaaatatttattgaatggccactctgccccatgcaccactataggtactggacttacaaaagtgaacaaaataggcaaggtcactgcattcattgagcttaccttctagtggggagaggcagaaaataagcatgtaaataagtaaataggtacaattactattactttatatttgcttacatgctataaataaaatagagtaatggggtaaagcatgctgtttcacagctataaggttaatacagtgcattcaacataatatgttccataagggctgggattatcatctgttttgttcaatgttatttcctcagtacctaaaacagtacatagtaggttctcattatttgctgaataaattgattagttgtgtatttgtgccattgttcttaaataggatgaacacctttaactctctacttaggggattaggagttgcaacaagatgtcttagagatttaggggttctttcagatttgtttgggcagaagagaattctgcatgcccaactttgttgagcttcagtcttatatcctccagtggaataatgtgtgggaagcacagaactctgggatgctgtgaaaaatcttgaagtttatgtgtgggtaatcagtgggtgtacataatgcttttaacatgggagggaagtgactgtcatcaagcttagtaattgctacttgaatctgagagtacttctgaatccacctatgtctaagtgggccttcattttgtttttatagcaaactttttgaagaactagctcagtgatcggaaaggatagaactctttcaaaattaaacatgactgtgcctcacccctcacttactacattagtttggggagttgtgtggggtagagggcggagaccatatttgtgtattgtaaaaaatttttaaagccccctacacacttcttccttttccaagtagaaacacaattgcatatctacatctatttaaatatatatacatttaatgtttataaccatcatggacccttaatgacaggctatgtttggagaaatgcatcattaagcagtttcattgtgtgaacatcatagagtagtatacttacacaaacctacatggtgtagtctgctacacacctaggctatatggtatggcttatagctcctaagctacaaacccgtacagcatgtgactgcactgaatactgtaggtaattataacacaatggtaaatatctgtatgtctaaacatatctaaacgtagaaaacatgcagtaaaaatatggtattataacttatgggaccagtgttgtaaaagtgctttgtcattaaccaaaatgttatgcagtacatgtctgtagtcgctagtaatccaatgcactttaaacagtgtttagtatgaggaccatggatttgctttatttctccttttaaatatttcattgttgtgacttatttcgtaaagtaatttaaaataatttttgtggttagagcaacagaggagaataagacacttaaaataattaaacatgtccatgtttgtatactctggaggtaactcctgaatgagagtagatagctgaggacagttattacaattttaagtttaggttaagtctttattgaacagcctgaaatttggttaaaacaggcccccatcatctaatataaaggatgaacaaacaatcgaaaaacagaaaacaattttttcctttttgcttcctggtgggtacttcaaaatattcccaggtgtccccagttgtcttatatcctgtttaagaaaaatctgatgagcagtgaagaattctacccattgagcatcagtatctcttagaatatgccctacatttccattttggaaactaggtatgtttcataagcctttaccttacctgagcaaaaggtatgttaaaaagtatgttaaggtacctcctttgttagccttcatgtatgaaatatatggcaaaagtaggctacagcggtgtctatgtgctgcctcaatagcctgttgaaaagaaaaactgattatttttagtgaagctgtttaactaaattctgtacttaacgggcatgctgacagtacatttaacttgcttatgagttacaagtcagaagcagggctaaaagtaagctatctttaaatattactttaatttatatcatattgtctttcattatctgagtactgaagcccacaaatggaagaacattgctacaaagtcttaaatttaaattttatagttgaataattctctgagaatttgctattctttattatgtctaatgaaagttttaaaaattgtaagcattctcaaaagaaggataaataattgtgtatcttttttaaactagtgttcagaatcaagtggatgaagttattgatgtcatgcaagaaaatattacaaaggtaattgagagaggggagagactagatgaactacaggacaaatcaggtacagatcttcatgtatttcttgatattactaatctgtttgctagtttttgtcttctacttgtctagccaacgtttacaaatcttggcttaggaaattggcatttggttcttaagtatatgattttaatggtttaattttaactcctttactttgagtcatcttattgtttcattattttttaattgttcagtggagaatgaagaatttaaaatttcattgttgaagagtgaagagtagagctgttttttcttttgccctgtgatattgatgaactttgtgtttctcatgatctcagggcctaaagacctactcacttttcaacacttgtttcaaacttatctgctatttttattttatgttttatttggtaacttagtcacctttctttactttcagtcattacacctataacctatacctatacctatacctatacctggcacgtacttgccactcaaatattgtttggtgaatggctgaatacctgattaatctttgacagactttagaaaaaaaaaaaacacctcgcttagtcacatttaaaatgtatattgttttcctttaaaatcagtcacttttgatatcttctaagaagctaacttctcaacatgtaattttttttctagaggtgtgccaagtatttgaatttttaaagagtatttttcttactagatttcctaagtttatttataagcattaaggccctaaaaagacttttcttaattttataataaaaaagaagtgagcaaactgatctgcaagctgttttttgctttttgttttcatttttttaataatgtagaatgccagagtttgtgggtggaaaaaagggagaatgctgttttcatgcttaaaagggaataaatttgcagaagtagaaattaatattttcttatctttgtgtgactagataaaagaatcctgttatgtcgtttaatccttctctccatcctctatgtgatatagaaagcttatcggataatgcaacagcttttagcaacagatccaaacaacttcgaaggcaaatgtggtggcgtggatgcaaagtaagtaaatcagaagctactggatagactggtcagcatctgaagtggtattcaaacacatgaagaaaaaagggcctctagagcataacctctgtgagaacagggcctataactgtcctgagacatggtagaaattcagtaaatacttgttaacttaattgcttttgggatagggataactaaataaatcagtatgcctaaaaggatgttttcatagatttttttaatgaaagtaatccacattttattaatatttgactacctctaaacttattaacttaaaacaaatatacattttttcttgaaatttactattaatacttttttggagcaacctctatagcattatgtagagatatcaaaagtaggagctagagaaaaatatgactttcggttgaaagggtaaaaaataaaagcttacatatccgaatctgttaagacaaatggagttaagaaaaaactccacttccctcattattccagaaaaataaaaagtaaaagaaatttttaccatttttaacaaggtaaacattggaatcactacatactaatatatactcctgcaaaacattgtatagaaatacatttacttcttaaatccactgtggctactaatcattaacagaaaatgtttttcacgttatatgagcaaatcttttttttttttctcctgattctagttataatttttggctttgtttaaaatttagacatgaactcactgtttttagtctctcattttcaatttcaagtttagcaataactctcctttttttttttttttttttctttgagatagagttttgctcttgttgtccaggctgatctcggctcaccacaatatcaccgcaacctctgcctccagggttcaagcgattcttctgcctcagcctcctgagtagctggaattacagacatgtgccaccatgcccagctaattttgttttttttgttttttttttttttagtagagacggggtttctccatgttggtcaggctggtcttgaactcctgacctcaggtgatccacctgccttggcctcccaaagtgctgggattacaggcatgagccactgcaccagccagcaataactttctaaacctgacttagccatatgctgaggattttttccaagagttaccttggatttatttatttttatttgtctacctattgaatcgtcctactttcagaagtggaactgagggaagaaatatgtttcatttctccccttgttcagaatttaaattttctattctattttaagttatttattctttaaagaataaatttattttctttaaagtctttttttttttttttttgtggcactcttgctgtgtctctgaggctggagtgcagtggcacaatcttggctcactgcaacctctgcctcctaggttcaagtgattctcatgcctcagcctcctaagtagcccaggttcaagcgattctcctgccttagtctcccgagtagctggaattacaggcatgcaccaccacacctggctaatttttgtatttttagtagagacggggtttcactatgttggccaggctggtcttgaacttctggcctcgagcaatctgcccacctcagcctcccaaagtgctggattacaggcatgagccaccacactttgcctaaagcttctatatctatagaaattttctattctgtgggctaatttagaaaaacaaaaagtccatgagccactcaccccttctctctcccaaactcatgtaccctattcatgtatccacaaaaagatggtcataatgtacattttgcctagctttttttttaaccattgctaaaaatgtttgctttgtactttatggggtttgggtcagaggaatagcgtgcttttaaggaggaaaaacattgagtcatatttttaaatagtcatcaccttgagaacctctggggaccatgaatagcatcgaccatgtaatgaaaatcattgttccataatgtaacaaacaccatttacagtagcgagtattcttcatttattattttctaatgcttagcttccttcagttttactgtgccccattaatacttcattgtgctactgttcatctggggcagcctccctgtgcctgccattttctagattgacttccataatggtaatttcagaagggttttaagaaaaaggatataagggcagaacgcagatcaggagttgccagtggctaagggggatgtcgtgcagttggagactcacaacaggtcatgaggaaacttgttaagggtgttggtggaaatgtcctatatttgattgtggtcatgtttattaacagctggatatatttgtcaaaacctatcaaaagtattttaagaggataagttttattctttgtaaagtgtatctcaatatacctggctttaaaaataaatgagttaataaaattatccataggtggggaaagagaatcgctaacacctctcttaatatatctgggggctgtgaaactcttatatgtttaatgacaaacagatttttgttcatgttatttggaataagagagctttggacttgcatgaatacaatactgccatttggagctgtaaacattttctgcccagtgttagaaacccaaggaagaaaactctattcattgaggtgttttaaaattgatattgatgttttcattcaaatcttcttaagtaaagccaaacacacgtttaacagggcaaattaatgtacatttcaggtaaagttgaaaaactaccgtagaaattccaaattgttttagaaatgcttcagattaataaaaaaggcttaaagtactttatcatataaactgaacctctatgatttgatgggcttattactaatgtgagaccagagaaaatgtacagtattttagcaactctgttcaagtgtcaagatatgatgaataacataggccatgcaattcaaatggttcaatacatcgaaggtagcagtttatagcactttttttcaaagtatatgagaattctgttagttttttctccccttactttcttctttgcatttttatctccattttgaggaatatattttagattctttatgaatagcctcatgtaataagcaactttgcctaagagcattctgtgtcagttttgtagttaagaaaccttaaggtgatgagatgatttagtatgatgcagtaaatagaacaacaaatagtcttgactttattaacaagtcaaatattaatatatatgcccttttgtgtgttgtagataaaagccatcatggctttggttgctgctatccttttgctagtgattatcagtaagtatttattggattattacttcctagggtatcatttattttggagttcattttaattcccttttattttcagttgacctagtatgtctgaagtcaggattgaataatgacttctgacctgtctcaggagctcttagaatctattgatctctgaaaatgctcttaagtaatatgtaaaattttatgtgaatatgtatatgtacatttctatggagagagggtctatatcttttgtcagattctcaaagggaactcctgttctgcccccaaccctcacccccaaatccagggctaagtgatttgttcaaggccaaatctggttcctattacactaaggtctaaaatactcattttctatttattattaactctcaggaatggcagtttgcattttgtaatattgttttggaagtataaatccaaatacgttctccagatgatttttttttgtttggtttttgttttgttctgtagttgagcataatttccatcattaaagcatgactccttcccgtcctttttcccttaatgttcttttaaaaatcagatcattttaaatatctctttttcttcaaggcctctgcctatgtttacagagaggttttatgacgctttggaaagtatctaaaaataatcatttgaaaaattatattatgctgttatatttttaaacagaaaaaaatgttttgttacaaagaaatacagtcagtcctcattattcatagattccgtgtttgcaaatccagttaccaggtaaaatttatttgtaaccccaaaatcagtactcatggtgctttcacagtcatttacagacattttcagagtaacaaaaaattgtaagtcccccaacccacacatccctagctgaggttaaacaaagccatttctgcctttttatttcagcactcataacataaacattctttttgtagtctatttagtaccacattttctgcattgttgtgctttttgttggtgatttcactgtttaaaatggtccccacacgtggtgctgaagtgctgtctagtgttgctcagtacaagagagctgtgatgtgtcttcatggaaaaaatacacattaggcaaacttttgttcaggcatgaattatagtgctgttggccttgagcacagtgttactgaatcaataatacatattaaataaagtgtctttaaacagaaacacatataaaccaaggttatgcattgattgacaaaaatgtagtagccagagactcacaggaacttaaccctatattttccctagaagcagtgtttccatattcactaatttagtgtttgtagtgaccttatagaaaataattacctcagaaaccaagaatcaatcatgtatatatagtgagcaattggaaaatgtgaaatattaataacaaaaagaagaaaaattcaactataatcttacaattagtagagatagctactaatataactattatatatacttctcttttcctattaatatacaagcatgttttttaaaaaactaagactatattatatgtactttctaataaatatattgtgactattatcccaggttatcaaaatttttagtaatattttaacagcagatacaagctatggctatgccattatttatttaagatgccaatgttagacatttaggttgttttatgatattttttgcttctcctttcccattgattatttattacctcagataaaagttcagtcaatcctcattacccatttctaaaagtagacacaactacatttaggaatattgcttcaaacatagcatatatatctgatgttgatatattgcttttttcatgttttctcttacagttcttatagtcatgaaataccgtacttgatttgatgacagagatcttcattaaacaagatctgggacagtaataaaagattgctgcataatttaaatgaaacctatgtgtatataactttcaaaacttctttttcaagaaactaagaggcaagtatcacttcaaattggaacgttgagaatgtccaattatcttctccctttctaacaaaatgttcttttaataattatgtttaaggcaaagagaactagcctctatttttccatatttcaaggatctaatttgaaactagatacttgccagttcattatttgtgtatataaacactgattataatatttcatattaatattttaatggcataaggacttgcattattgcattagggagcgggtcatgctgggggtcaggaagcctgtgtagagtaccaaattatatgctgaaagagatgcataaccattctgtcaatatttgcagaaatatagttcctttcatattacagttgttttgcaagcaatttccacatttataggtgtaacaaaagctaaatgttgtaaatgttgttgccctcaggtataactaaaaacattccagtaaatatatttttgactgtgtaagagaatgtgtagtaatttttttggcattggattatggaaatggaaatttttaaacagtgtgaaaaaacatggtatggcatcataaaactggagataataaagttattgaagagtgtcattggagtatttgaaaatgaccaatatatagctgccagtcatggtccagtctgttttctgttaaactccaataaagagagaccagtcagtcctaatgtgagtaaatgaaatttacaggtaacttacttactccttaattttattttagttaatagcctctaacttccaactatctcatttaccaaaagtacaaaaagtagcaaaaccatctattaatactttgaattttatatctttgcatttcctgttcatccttgaggagatgtatgttgcacaatcaaattttgcatcagccaacagtaatgagtagtagaaagtcaggaacctaggtgtatatatatatatatatatatatatatatatatatatatatacacacaaacacacacacacacacacacacacacgcacacatatgataatcagtcagtcggtaaccaaatgctagagagtgaccattaacctaagcctgtttttataatgaaaaaatgtgttaactttaaaatatgccaacctccttgtgtcttttaaacaagtcagagtgaaaatacattgtcccctaaggtgtggggagaggaagctttataataaaattagtgattctgcagaaacttgtgcactggatatcttgacaatatgaatataaaactccctaaattaaaaatagggttaatagaaattatcagtatttaaatagggaaaaatgattttatgtttattttatttaggttttatttctttggtcatcttaatgcaaaatgaataaagcatagaatctgggtttggtgtttttttgtctgtttttaaaattctacaggattattactaggaggcaaaaaatgctgtttagaatggaaaaaatttgaagagagaaagcagactgagacactcaagacacctgcaagttatctaagaagatctaaatagaattactaaattttatagtttgcttagagcatttagaaggagataaaggtcttacatactatagtgtatattgtctttggtctctatgctctttgtaaatgtcaattaatataaacagcatctgaacagctaataaatcttttaagttaagatacccagaaaaatgagcatttttagaatttcagtagctaataattcaggaatggaaatattttaactgaatggacagaatcagtcctaacatttgtatgtatgtcctttatttgaattggaactaggctcataagtggttaattttccattagttgatgtagaaatctggtttctccataatatctacaagtgaagatgaagattacttctcaaaaagtatccatatttccagtgttccttttaataaaatatgccacttttaaataaataattacaaaatgtaaaattataaaatttttaaatttaaataataagtaacagtaaaattttttgacaatatatatgtcactgtctttgtaatttaaacatattgctgcctgggatatgggtaacagaattatcactcatggaactttgtagtagtgatggcttggtttgtaattcatcatttcatctttcttggtcttgattaatcctgaaatccttaaaatggctggcatggttatgactttattgtggtaaccttggagatataagccctcttacgatcaaaaacagaagaaaaaaatatattgttcaaactgatgccaggcctacctttattccctcccttaattactttttttctcattcagctcagatcatcctgcacttgaaaaatgaagttttaccaccatcaaaactatcattatttaacaacaagtgaagatcaacagaaaaattcaagtagctttgcaaatactagttgatactcagtgaaatcacgtcactattttgatgcctgaatccatacctttgtgatttatgtttaattacagaagcctattgccttgcagcaattttgttgttataatactgattaattggttactccttcttattataactcagtaatacctgtggtcatttggttcctctatcctgacaaagttcactggaaattgccctcagattttataaactgggggatttcttaattagataaaagttcattactgaagatggaatattatataagatggaggaagggtaattaatagacatgagatatagaaatactttgttagccctgctatagattgcctattgtagtctttctgtgcatttcaatagtctgtattaggaaattataacttcagcacttttgatagcaaaaattggcatctttcaattctgtatagtatgtgactatcctgtaaatgataatatgtgtacagactgagaaggcaggaatataaagtaattgaaatctctcattgccggtatactctaaaacatgcttgatgccttgtcagcatcattgcacacattgactctgtatttacatctgtatatacactatgattagaaaatatgcaagaaattgtttttccatgttaagaacaaatgccattagaagatgtccccttaattgtattgtcagagtattactatgtcaaggatgactgttctgttaacctaattttgtgttttcacatggaaatgtgattggactccatttttctgtgagttgagagtaagagcataagtcagtttgaaagcatttacaagtttgttttagaatgtagtaagggctgaaaggtgctctacttcttaacttgttttttccatgttgtagacaaatgaaatttgtctaaatgcttttgtctaaaaatgcatttgtctaaatgctttagattgatgtagggtttagatcctctttaatactttgagatagtcttattctgattttttttttcttctggaaaccaagtagaattagggatgggaatacaaatgcatttattctggcttctgttttattccaagaagcttcttggaacaaatcagtaggaattgaaaagaaagcatgaccaacccaattacaggggataaatgtaagcttgttaaagtaagcaccacaccatgtttctgtctccccagcacccagcacagtgctgtgaaccttggcagatgctagataaatgtgtgttgaatgaatgtgcctatgaagccacaaagatgccacatgttagtatatcagtgagaggtgactccacagtgctctctggagaagcaatatgagtgactgaagagtggggccttttgcttttgcctggatataggggtgctcttctactgtaattgggtgtggaaaaactctggctttatggtattccattaggttcttttcatttaaagtagtcttaaaatcaaagtatccaatattttaaagccacaaagtagattacataattagcagagattttagtcagtaaaatgttagaaatcaaactataagaaaattcaagtcctttattttgtgtcttgggtatatgtcattattttaaattccacactcccttatttaatcactttggtaagtgcctttgatgttttgaaatgtatagtgggagatgagcaaatgtaaatgtcatgtgccctgttccctagcttctcaattcctcataaccatttttaccagtgttgcaaagtttagacctttgtgttaatatcagaagtgtatttgtagcccctccatagtgaacaatgaaataaactatttcat

SEQ ID NO: 265 - DNA, 2702 bp, Homo Sapiens
ggccgccgagcgccgatcggctcgatgagcggaggcgctgctgcggcgctgcggccgacgccgggtccgcaccaactgtctccccctcccagcttcttacctcggcttcctactccttcccccgcccgcccagcaccgccagcccgggagagctgccgggagttccccgggagcctcaggtactggcgctggcctgtggtgactatcctgttgagaagcaaaagatactttgcaagtaaaaaatatgcctcccaagtttaagcgccacctcaatgatgatgatgtcacaggttctgtgaaaagtgaaaggagaaatcttttggaagatgattcagatgaagaagaggacttttttctaaggggaccatctggaccaagatttggacctagaaatgataaaattaagcatgttcagaatcaagtggatgaagttattgatgtcatgcaagaaaatattacaaaggtaattgagagaggggagagactagatgaactacaggacaaatcagaaagcttatcggataatgcaacagcttttagcaacagatccaaacaacttcgaaggcaaatgtggtggcgtggatgcaaaataaaagccatcatggctttggttgctgctatccttttgctagtgattatcattcttatagtcatgaaataccgtacttgatttgatgacagagatcttcattaaacaagatctgggacagtaataaaagattgctgcataatttaaatgaaacctatgtgtatataactttcaaaacttctttttcaagaaactaagagctcagatcatcctgcacttgaaaaatgaagttttaccaccatcaaaactatcattatttaacaacaagtgaagatcaacagaaaaattcaagtagctttgcaaatactagttgatactcagtgaaatcacgtcactattttgatgcctgaatccatacctttgtgatttatgtttaattacagaagcctattgccttgcagcaattttgttgttataatactgattaattggttactccttcttattataactcagtaatacctgtggtcatttggttcctctatcctgacaaagttcactggaaattgccctcagattttataaactgggggatttcttaattagataaaagttcattactgaagatggaatattatataagatggaggaagggtaattaatagacatgagatatagaaatactttgttagccctgctatagattgcctattgtagtctttctgtgcatttcaatagtctgtattaggaaattataacttcagcacttttgatagcaaaaattggcatctttcaattctgtatagtatgtgactatcctgtaaatgataatatgtgtacagactgagaaggcaggaatataaagtaattgaaatctctcattgccggtatactctaaaacatgcttgatgccttgtcagcatcattgcacacattgactctgtatttacatctgtatatacactatgattagaaaatatgcaagaaattgtttttccatgttaagaacaaatgccattagaagatgtccccttaattgtattgtcagagtattactatgtcaaggatgactgttctgttaacctaattttgtgttttcacatggaaatgtgattggactccatttttctgtgagttgagagtaagagcataagtcagtttgaaagcatttacaagtttgttttagaatgtagtaagggctgaaaggtgctctacttcttaacttgttttttccatgttgtagacaaatgaaatttgtctaaatgcttttgtctaaaaatgcatttgtctaaatgctttagattgatgtagggtttagatcctctttaatactttgagatagtcttattctgattttttttttcttctggaaaccaagtagaattagggatgggaatacaaatgcatttattctggcttctgttttattccaagaagcttcttggaacaaatcagtaggaattgaaaagaaagcatgaccaacccaattacaggggataaatgtaagcttgttaaagtaagcaccacaccatgtttctgtctccccagcacccagcacagtgctgtgaaccttggcagatgctagataaatgtgtgttgaatgaatgtgcctatgaagccacaaagatgccacatgttagtatatcagtgagaggtgactccacagtgctctctggagaagcaatatgagtgactgaagagtggggccttttgcttttgcctggatataggggtgctcttctactgtaattgggtgtggaaaaactctggctttatggtattccattaggttcttttcatttaaagtagtcttaaaatcaaagtatccaatattttaaagccacaaagtagattacataattagcagagattttagtcagtaaaatgttagaaatcaaactataagaaaattcaagtcctttattttgtgtcttgggtatatgtcattattttaaattccacactcccttatttaatcactttggtaagtgcctttgatgttttgaaatgtatagtgggagatgagcaaatgtaaatgtcatgtgccctgttccctagcttctcaattcctcataaccatttttaccagtgttgcaaagtttagacctttgtgttaatatcagaagtgtatttgtagcccctccatagtgaacaatgaaataaactatttcat

SEQ ID NO: 266 - protein, 141 aa, Homo Sapiens
MPPKFKRHLNDDDVTGSVKSERRNLLEDDSDEEEDFFLRGPSGPRFGPRNDKIKHVQNQVDEVIDVMQENITKVIERGERLDELQDKSESLSDNATAFSNRSKQLRRQMWWRGCKIKAIMALVAAILLLVIIILIVMKYRT

SEQ ID NO: 267 - DNA, 2683 bp, Homo Sapiens
ggccgccgagcgccgatcggctcgatgagcggaggcgctgctgcggcgctgcggccgacgccgggtccgcaccaactgtctccccctcccagcttcttacctcggcttcctactccttcccccgcccgcccagcaccgccagcccgggagagctgccgggagttccccgggagcaggtggtgactatcctgttgagaagcaaaagatactttgcaagtaaaaaatatgcctcccaagtttaagcgccacctcaatgatgatgatgtcacaggttctgtgaaaagtgaaaggagaaatcttttggaagatgattcagatgaagaagaggacttttttctaaggggaccatctggaccaagatttggacctagaaatgataaaattaagcatgttcagaatcaagtggatgaagttattgatgtcatgcaagaaaatattacaaaggtaattgagagaggggagagactagatgaactacaggacaaatcagaaagcttatcggataatgcaacagcttttagcaacagatccaaacaacttcgaaggcaaatgtggtggcgtggatgcaaaataaaagccatcatggctttggttgctgctatccttttgctagtgattatcattcttatagtcatgaaataccgtacttgatttgatgacagagatcttcattaaacaagatctgggacagtaataaaagattgctgcataatttaaatgaaacctatgtgtatataactttcaaaacttctttttcaagaaactaagagctcagatcatcctgcacttgaaaaatgaagttttaccaccatcaaaactatcattatttaacaacaagtgaagatcaacagaaaaattcaagtagctttgcaaatactagttgatactcagtgaaatcacgtcactattttgatgcctgaatccatacctttgtgatttatgtttaattacagaagcctattgccttgcagcaattttgttgttataatactgattaattggttactccttcttattataactcagtaatacctgtggtcatttggttcctctatcctgacaaagttcactggaaattgccctcagattttataaactgggggatttcttaattagataaaagttcattactgaagatggaatattatataagatggaggaagggtaattaatagacatgagatatagaaatactttgttagccctgctatagattgcctattgtagtctttctgtgcatttcaatagtctgtattaggaaattataacttcagcacttttgatagcaaaaattggcatctttcaattctgtatagtatgtgactatcctgtaaatgataatatgtgtacagactgagaaggcaggaatataaagtaattgaaatctctcattgccggtatactctaaaacatgcttgatgccttgtcagcatcattgcacacattgactctgtatttacatctgtatatacactatgattagaaaatatgcaagaaattgtttttccatgttaagaacaaatgccattagaagatgtccccttaattgtattgtcagagtattactatgtcaaggatgactgttctgttaacctaattttgtgttttcacatggaaatgtgattggactccatttttctgtgagttgagagtaagagcataagtcagtttgaaagcatttacaagtttgttttagaatgtagtaagggctgaaaggtgctctacttcttaacttgttttttccatgttgtagacaaatgaaatttgtctaaatgcttttgtctaaaaatgcatttgtctaaatgctttagattgatgtagggtttagatcctctttaatactttgagatagtcttattctgattttttttttcttctggaaaccaagtagaattagggatgggaatacaaatgcatttattctggcttctgttttattccaagaagcttcttggaacaaatcagtaggaattgaaaagaaagcatgaccaacccaattacaggggataaatgtaagcttgttaaagtaagcaccacaccatgtttctgtctccccagcacccagcacagtgctgtgaaccttggcagatgctagataaatgtgtgttgaatgaatgtgcctatgaagccacaaagatgccacatgttagtatatcagtgagaggtgactccacagtgctctctggagaagcaatatgagtgactgaagagtggggccttttgcttttgcctggatataggggtgctcttctactgtaattgggtgtggaaaaactctggctttatggtattccattaggttcttttcatttaaagtagtcttaaaatcaaagtatccaatattttaaagccacaaagtagattacataattagcagagattttagtcagtaaaatgttagaaatcaaactataagaaaattcaagtcctttattttgtgtcttgggtatatgtcattattttaaattccacactcccttatttaatcactttggtaagtgcctttgatgttttgaaatgtatagtgggagatgagcaaatgtaaatgtcatgtgccctgttccctagcttctcaattcctcataaccatttttaccagtgttgcaaagtttagacctttgtgttaatatcagaagtgtatttgtagcccctccatagtgaacaatgaaataaactatttcat

SEQ ID NO: 268 - protein, 141 aa, Homo Sapiens; identical to SEQ ID NO: 266

SEQ ID NO: 269 - DNA, 1698 bp, Homo Sapiens
ggccgccgagcgccgatcggctcgatgagcggaggcgctgctgcggcgctgcggccgacgccgggtccgcaccaactgtctccccctcccagcttcttacctcggcttcctactccttcccccgcccgcccagcaccgccagcccgggagagctgccgggagttccccgggagcaggtggtgactatcctgttgagaagcaaaagatactttgcaagtaaaaaatatgcctcccaagtttaagcgccacctcaatgatgatgatgtcacaggttctgtgaaaagtgaaaggagaaatcttttggaagatgattcagatgaagaagaggacttttttctaaggggaccatctggaccaagatttggacctagaaatgataaaattaagcatgttcagaatcaagtggatgaagttattgatgtcatgcaagaaaatattacaaaggtaattgagagaggggagagactagatgaactacaggacaaatcagaaagcttatcggataatgcaacagcttttagcaacagatccaaacaacttcgaaggcaaatgtggtggcgtggatgcaaaataaaagccatcatggctttggttgctgctatccttttgctagtgattatcattcttatagtcatgaaataccgtacttgatttgatgacagagatcttcattaaacaagatctgggacagtaataaaagattgctgcataatttaaatgaaacctatgtgtatataactttcaaaacttctttttcaagaaactaagaggcaagtatcacttcaaattggaacgttgagaatgtccaattatcttctccctttctaacaaaatgttcttttaataattatgtttaaggcaaagagaactagcctctatttttccatatttcaaggatctaatttgaaactagatacttgccagttcattatttgtgtatataaacactgattataatatttcatattaatattttaatggcataaggacttgcattattgcattagggagcgggtcatgctgggggtcaggaagcctgtgtagagtaccaaattatatgctgaaagagatgcataaccattctgtcaatatttgcagaaatatagttcctttcatattacagttgttttgcaagcaatttccacatttataggtgtaacaaaagctaaatgttgtaaatgttgttgccctcaggtataactaaaaacattccagtaaatatatttttgactgtgtaagagaatgtgtagtaatttttttggcattggattatggaaatggaaatttttaaacagtgtgaaaaaacatggtatggcatcataaaactggagataataaagttattgaagagtgtcattggagtatttgaaaatgaccaatatatagctgccagtcatggtccagtctgttttctgttaaactccaataaagagagaccagtcagtcctaatgtgagtaaatgaaatttacaggtaacttacttactccttaattttattttagttaatagcctctaacttccaactatctcatttaccaaaagtacaaaaagtagcaaaaccatctattaatactttgaattttatatctttgcatttcctgttcatccttgaggagatgtatgttgcacaatcaaattttgcatcagccaacagtaatgagtagtagaaagtcaggaacctaggtgtatatatatat

SEQ ID NO: 270 - protein, 141 aa, Homo Sapiens; identical to SEQ ID NO: 266

SEQ ID NO: 271 - DNA, 1717 bp, Homo Sapiens
ggccgccgagcgccgatcggctcgatgagcggaggcgctgctgcggcgctgcggccgacgccgggtccgcaccaactgtctccccctcccagcttcttacctcggcttcctactccttcccccgcccgcccagcaccgccagcccgggagagctgccgggagttccccgggagcctcaggtactggcgctggcctgtggtgactatcctgttgagaagcaaaagatactttgcaagtaaaaaatatgcctcccaagtttaagcgccacctcaatgatgatgatgtcacaggttctgtgaaaagtgaaaggagaaatcttttggaagatgattcagatgaagaagaggacttttttctaaggggaccatctggaccaagatttggacctagaaatgataaaattaagcatgttcagaatcaagtggatgaagttattgatgtcatgcaagaaaatattacaaaggtaattgagagaggggagagactagatgaactacaggacaaatcagaaagcttatcggataatgcaacagcttttagcaacagatccaaacaacttcgaaggcaaatgtggtggcgtggatgcaaaataaaagccatcatggctttggttgctgctatccttttgctagtgattatcattcttatagtcatgaaataccgtacttgatttgatgacagagatcttcattaaacaagatctgggacagtaataaaagattgctgcataatttaaatgaaacctatgtgtatataactttcaaaacttctttttcaagaaactaagaggcaagtatcacttcaaattggaacgttgagaatgtccaattatcttctccctttctaacaaaatgttcttttaataattatgtttaaggcaaagagaactagcctctatttttccatatttcaaggatctaatttgaaactagatacttgccagttcattatttgtgtatataaacactgattataatatttcatattaatattttaatggcataaggacttgcattattgcattagggagcgggtcatgctgggggtcaggaagcctgtgtagagtaccaaattatatgctgaaagagatgcataaccattctgtcaatatttgcagaaatatagttcctttcatattacagttgttttgcaagcaatttccacatttataggtgtaacaaaagctaaatgttgtaaatgttgttgccctcaggtataactaaaaacattccagtaaatatatttttgactgtgtaagagaatgtgtagtaatttttttggcattggattatggaaatggaaatttttaaacagtgtgaaaaaacatggtatggcatcataaaactggagataataaagttattgaagagtgtcattggagtatttgaaaatgaccaatatatagctgccagtcatggtccagtctgttttctgttaaactccaataaagagagaccagtcagtcctaatgtgagtaaatgaaatttacaggtaacttacttactccttaattttattttagttaatagcctctaacttccaactatctcatttaccaaaagtacaaaaagtagcaaaaccatctattaatactttgaattttatatctttgcatttcctgttcatccttgaggagatgtatgttgcacaatcaaattttgcatcagccaacagtaatgagtagtagaaagtcaggaacctaggtgtatatatatat

SEQ ID NO: 272 - protein, 141 aa, Homo Sapiens; identical to SEQ ID NO: 266

SEQ ID NO: 273 - DNA, 132261 bp, Mus Musculus
  misc_feature (1)...(132261): n = A,T,C or G
ctctcttcccctccccaccccccgcggtggtctcccctttcccaccccagcccctgcggagccatggctcggagtggctcctgcccgcacctgttgtgggacgtgaggaaaaggtcccttgggctggaggacccgtcccggctgaggagccgctacctgggtgagcgggggccccggggcggcggcgctgaggtcgccgcccagaggtgggggagggggcgccgccggggctgttggcgaccggaccgagccccgaccggggcgccccgcaggctaggtctcaggtgggatgacggcgatccgcgcccgctcctcctaaggtcggggtcccctttgcaagctgccaggcgcggctcaagctgggcttccctcggagagccgggccgtggggaggcggcactaagcccggaaaggtgttggggtcgctcgtgggctgggactccggagaagactccgcgagccttacggagatgccacgttgaacgccaaagttggcgcttttgcttttctccggagctgtccccgctcagccgaagacctcaaggtgttgcttgtccaccttcttcttcggcttccgcaaggggttagatgtcgcccgagagagacgctgttgaccaccctcagggacttgacaccccagccgggctcgctgtaaaccgtggcgcttagcccaaacctaaaagagatcgcggagccctccccacccccgcgccttcccaggtccagcctgctgtcagtcccgtagacctcttttaggtggtgtaaggtttcacgttcctgttcccacccctggaaaacacacttggcattttctgtttcttagttaagctttctaaaaacaaccttcaggactgtggacgcagggttccacctttttcgttctgtgtaccgtgagttttgttgagtgtgttgggtcatgccagagtcaactaaaaagtcctgtttcttcaaagtgcctcctccccccaactctgtcatttctttgccaagtgaagcgatttgttgctgtcatttttttttttttttttactaacaacaaaaatagaaagaaatgaaatctcattacagccaatactactggctgtaaattgcttaaaggacgcctaggtgtgcgttttaatgtttttaaatgaatgttatcattgtaagaattaaatacaaaaaagcagaagtcccagaatcggtcccatttggatttcatgccactgcccctagaaatgtttctgttttgtgattattttccttgatttatttccttcttagaaatgcatacatatataaatactagtgcctgtatgtgcaccctacatgtgtgtgaatgaaaaccggatgcatggtggtgaaagcatttttctcccttgcttttttcttcactgcgtctggagatccttttagacataaaaatgtgtgtaaaacattacatagtacttaatgaagaattttaatgttctaagttttagtctctttaatttttatttgaaagagactccttatatagtccagactagccttaacttttatctcattctcctgatagctgggattacactgtaaattttcacctgaccctgtccccttttctgtaatatgtgttcactgtcatgactgtgcaaacatcatttacatatgttgtagtaagtacctagactgcttgtttttaatatttgtaaagtcctttttaaaatccttgtcttaaaagaggtgtgaaagtttattttaaaatttagtttgtgtagaaaaaacagacttttaccttaataaagcaaatgctaaagttttgtgtgagtgaagttataatttagtcttatttcaattgggtttggctgtgtataataaaggtaatgagaacatggtcagtggggctctcgagatggctcagcgggtgagggtgccagctaccaagcctctgctgcttcagtttgttctctagactctgacattgcaaagagaaaactctttaagactaagaactgccttagtcttctaagttctggagttactgatgtttgccactatgtttagctttaagtaattgaagtgtaacaatgatgcatacttcagcacttctttaaaagcgatttttcctgggttagatggcagacatctgtaatcctgtaatcccagcacttccaaggtaaagggctggctggtaggatcacctgtttaaggtcatctttgaaataaaacctatgggcaggcagtctaatgaatctgatacctaataagtttctttgtgtgtgtggggggggggaggatgacctttctcataaagccttttttgatgaggaaggagacttgctgctagtttgaaggatttttagtgaaactctgtctcaaaaaacaaacaaacatacaaacaaacaaacaaacaaacacccttttaaattccaagtgcaaggaacttagaaagttagttgatttcttaaagacatgcagatttaaacatcataattgttcagagttttatagtttgcattttctcctaataggcttctattatttgcattcctaataataaattactgctaagtaacattcaaactggaatgctcatttttatggaggtttcgatactaaagaaacaaaacacaaaggttccattaacttcctcaggaactgaacaaggagagaaaactctgacaaaattaccagttttttagataatgacgctaatgtattcactgacttcctatagcacacaaacaggattggtattgtcactgcctgatcttaagtgtgtgaagattaggtactgggatgtagctcatttaaaagagtgcttgcttagtatgcaggaagccctgggttccattcctagcaccatatactggtgtggaggtgtcagcttgtaatcctaacactctggaggtagaggcaggaggataaagagttcaaggccatcccagaattcatgagaccctttctgaaaattaaaaaacataggcaatttttaaaaatttatttgggtatggtggctcatacctctagcacttggggcatggggtcaggaggattaataagtgctaggccagcttgggcttggagtacaggagacacattatttaaaaacaacaaaaaggatagaatgggtgggctggagagatggtttagttgaataagtatgcttactgtacaagcaaggggaccaaatttgggtctccagcatccttgtaaaaagctaggatagggtatagagacaggaacattactgggtttgatgactgtcttgtcagcctagctaaactgagagctcaagctttagcaagtaatcctgtctcaaagggagggggggaaagggagggacagcgagagaacgagtgtactctatgtcctttggccttcatgcattggctggtgtacccacacatacaggcaggtggacatgtttatattatatacacaagccgggtatggtagcttacacatataatcccaacatttagggggctgaggtggattgtttacaaattctaggccaatgtggcatatatagtccagagtgagatgagaccctgtctggaaaaacaaaacaacagaaccaaaaaacccaaagtgaggcagtaagctggctgggtgagtgaggaccttactgttgagacttggcatcctgagttagattcccgggactaatacagtaggagagaactgactccctattgtgtcctctgatccacacacatgtaatgtgacccactcctttccctaaatacaataaatgtcatttttgtttgtgatgttttcttttttcaaagatgcttttctaactggttacttataatcccagatttatgggagccagaggcagtagggtaccactgtgtttaaagccagcttgaggtacatagaggaaatacaaagaaaaccgaaccacaaaatttcacccaaaattctttaacacacagtagtgagagcttacaaagaagctataaatagtgaaattttacttagacctttgaaaaaataaggcaggttttattttactagtgtttgtaaatacaatcttcactttgtgggtaagtcagtaagattgctgggttgtataatgtgtctagccttgttcttcaacataatttatactataccacattcccatttgggatgtaggttccagctcttcttgtcaatatttgccttacttactctttctaatgttagctccccaccccttttaagatttactttatgcccatcaatgttcctgtgtgtgtgtgtgtgtgtgtgtgttcgttcctgttctttgactttcgggcctggtgcctgtggaagtcagtagagtgcctagaactggagttaaggctagttgggaatcaccatgtgggtgctaggaaccaaaccaagtcttctgtaaaagaaatacatgctcttaactgtccaaccatctctccagctctaattttagcttttttttttttttggtaagaggtgtataaaagtctattgcttcagtttgcatttttctaatggctaacaatcaaatatccatttgttttcttttgcattcatgtacattaattaaatgtgaaggttaccttttaaatttttttttatttatacatctatctatctgtgtgtacatcgttttggtacaagtaaatagattagaaaatttattgtattttattttttgagacagaggcttactatgtagctgtgactggcctgcaactcaatatgtatatgtcaaactggcctcagattcactgcgctccacctgcctcttgtctcctgattgctgagattaaagtcaaataggtttgtttgtatgtttgtttaacatgcattctcccctgtttgtcttgtctgttttctcttttatttgttggccttttagacagggtctctcccttatatagacgaggctgatctggaactactttccaaatgctgagattataggtgtattgccaccatacctggtgctgttttctttttctaaagtcctctctcttttcacctctgctaacctgtccctgcattccttccttgtttcttttctctctccttccctctttccctcccacctaccttccctgtcttgcccttcctccccctacatccctcccattccctggacagctgcctttttatccctctcttactttctggagatagggtctcatgtaaccaaaggatggtttgaactattattacacatctgtattttaacactgttttccgaacattgttcttaacaatatttatagtttaatatttttgaaacttttgtattctgttttaagaacctttacataatccaaggtcacaaaatgttttgctgttttcttgccccttgaaagttttctattttatctcatatatttaacactttgaacattgtagagtttttgattcgtgctatgaggcgaatcaagtttcatttcttcacttatgaatgtaaaattgatccaccactgtttatgaaaagactttccccctttgttgaaaatcaattaaccagatatgttcaaatcactttctccaccacattcattgatttaagtttctgtcttttgccagtactttattgtttatagtaaatgttaaaaatgggcttagtgtgtgataggagatgaaaggaagggaagaaagaatggaataaaatggccatttgcagctgactacttccctggcgccttttgggaaatagtgcataactgtcttagtttctattcgattgctgtgaagagatattatgaccaaggagcgccttagaaaaggaaacgtttaattgggggttaacagttttagagggttggtccataatcatcttaatggaaagtagacagggatggcattgtagctgtaaatgagagctttgcatcctaatccccagggaggaggggggagaaagaaggagggaatgagagacagagagactgggccttgttcaggcttttaaagtctcaaagtccagccacagagacacacctccttcacaaggccatatttactcaaacaaggccatacctcctaatccttcccaaacacttccactccttgatgacttaagcattcaaatatatgagcctgtagaagccatggtcattcaaactagcacaataactatgtcaggttcttctggtaaaagtatgttctttgacctataagatcttttcttgtgcaaaaggtggtcccaagtttgcaaacccctttgatacacaaatattaacacagtgatattctctggcatatttgcctgagaaatttacaaatggattgtttagagttgatactactcttctgtgtggattatcaggagcttcctgtgtccaagcaatgccaagatctcctttaataaaggggtggggcactcattttagaatcaatcccaagaggacagcctgaacccaggctgaacccagaaaacaatgatatataaagacataagatggggaggaatatctctacccttaataagaattgtccttgttttccagtaactcctgtccagggttaagttgcttacagatctgtgatgttcagcctgcctgctttctgctgtctgacttgggcattctcttccttgaagatctccatctatacacaccctccacctccctctatgggactgctgcaagactaccagtgctgagcctgtctgctttcttgatatctgattcagaaagtacaattttcctttttcttctttttcatctttggcagctgttgcaatctccagtttgcctgccccatttttatttgtctttcatttttcttctctcagtgcaagacaaagggataggagattgtttattctgggccaaatataaatgactatgcctgggaacacagatttaagttgctctgaataacatgttacaatgtagatgctccagtgtagaagcagttatgtgaacttgtatggccatcaaataaaaggaatcagaaatcaaggcattttccaaatttgtgaaaacaaaaggtgggtgggttatagcaaagggagaaattctactttaggttatgagtgtcatccagtaacatccttagttttggggttgctgaaaactagttatttttgaagtttatacattccaaaggttttgcctgataactgcaaaaatgtaggtcagatacagaggtgagcaatgagtgcctcataaggggttaaaggcagcctaagatagccagactcaatatctgcagtgttccaactcttccataatcagggcattctaatcagtcagctttgtagaatcatttttacgtaggtgtggctcctccttcctccccagcttcatttaatgcctatgaatctgttttttcaattatctgtaactctaagatcctgctaaagggatcctttgttctctagtgtcatatgacacttggtccttgtctcttttcacaatttcccagggaattctgagctctttccattttcatatacaattttaaaacaacttgtctgtcctggcttgtgatgcacattgataatcccagctcttagaaaacagagacaggaggattgctgcaaaattgagaccagcctggtttaaaattccaggtcagctgaggctacatagcaaagccttgtctcaaaatcaccaccatcatcaacaaaatcactgtcttgtcagtttctcaaaaacaatatcaacaacaaaaggcttgttttgtgtttgtcttagtcagggtttctattcctgcacaaaatatcatgaccaagaagcaaattgatgagaaaagtgtttatttagcttacacttccacatgctgttcatcaccaaaagaagtcaagactggaactcacacaggtcaggaagcaggaactgatacagagaccatggaggaatgttacttactggcttgcttcccctggcttgctcagcttgcttatagaacccaggactaccagctcagggatggcaccacccacaatgggccctcccatccttgatcactaatagagaaaatgccttacagctggatctcatggcatttctttaagggaggctcctttctctgtgataattccagcttgtgtcaagttgacacactaaaccagccagtacagtgttcagtctgtattatgtctgggagaactttcatctttatagtattgaatctttcaaactatgattctggtctagctctttattttggtattcgttgattcagtagttttgggttttgctgagttggggattcaacccagggcttcatttcttgccatgtaagctttcactgagctacagtctcagccctggaatgggcttagaggaatagaaacaattgatcttatatcttgaaccacaattaaaacatacctattaatttgtgtaacttttttctttaagactttttttttttaattttgtgtggatgattatgtcactgaatattaagtttgattcatcctctctctctctctttttttttattctcttaaacctgtatttagttctttcattgctctgggtaaggctcaaaaagttaaatatagaaataagagaggagactgtgtcttgacacagggtcagttgtgctggttaatttttgttaagcgtgatacaagccatggcatctgtgaggagggaacttctgttgggaaaatgccttcatcaaattggtttgtaggcaactctgtgggatacataagaaagcaaaccgagcagtgaggagcaagctggtacacagcattcctccatggcttctgcttcatttccttccctgacttttctcagtggtggactatattatggagttgtaagctgaataaactctttcctcaagttgcttttggtcacagtgttttcttacaataatagaaagaaaccttaactaagacaactattttcataatttttttaagtatttatgtgtatgagtattctgtttttatgagtggttaccacagcatacctggtttccatggagatattttctgattgaatatcctggaactggagttacagaagcaatgagccaccatgtgagtgctaggaactgaaactaggttctttgaaagagcagcaagtgtttataaccactggatcatctctttagccctcattcctgatttaaaaaaagattggcaggggttagatgtagatctgtgggagagcacttatccatcatgtacaaggctctgggttcaagccccattcctgaaaaaagaaaagaaacacatagagggactcagcagaacttaggaaattagtctgaacaggtgagagggtgcgccagagaaccggacagcttctgggacaggtggaagcacagagccgctgaggcagcacccttggcgggccgcagacagccggccaccgtccggaccagaggacaggtgtccgcctggcttgggaggcggcctcagcctcaggagcagcggtcaccatcttggttctgggactccctggaacttaggaatttagtctgcacaggtgagagtctgaaccacagaagctgacagcttctgggaactgccaaagcaacacagcttctgagaaaggccctgttttgggccttcttcttcggccaggaggaggtccaaaaacaagatatctgcgcaccttccctgtaagagagcttgccagcagagagtgctctgagcactgaaactcagaggagagaatctgtctcccaggtctgctgttagacggtaacagaatcaccagaagaacaatctctaaacagagtcaactataactactaactccagagattaccagatggcgaaaggtaaacataggaatcttactaacaggaaccaagaccacgcaccatcattagaacccagcactcccacttcgtccagtccaggacaccccaacacacccgaaaacctagacctagatttaaaagaatatctcatgatgatggtagaggacatcaagaaggactttaataaatcacttaagaaatacaggagaacactgctaaagagttacaagtccttaaagaaaaacaggaaaacacaatcaaacaggtagaagtccttacagaaaaagaggaaaaaacatacaaacaggtgatggaaatgaacaaaaccatactagacctaaaaagggaagtagacacaataaagaaaactcaaagtgaggcaacactggagatagaaaccctaggaaaaaaatctggaaccatagatttgagcatcagcaacagaatacaagagatggaagagagaatctcaggtgcagaagattccatagagaacatcggcacaacaatcaaagaaaatggaaaatgcaaaaagatcctaactcaaagcatccaggaaatccaggacacaatgagaagaccaaacctacggataataggagtggatgagaatgaagattttcaactcaaaggaccagcaaacatcttcaacaaaattattgaagaaaacttcccaaatctaaagaaagagatgcctatgaacatacaagaagcctacagaactccaaatagactggaccagaaaagaaattcctcccgacacataataatcagaacaacaaatgcactaaataaagatagaatactaaaagcagtaagggaaaaaggtcaagtaacatataaaggcaagcctatcagaattacaccagatttttcaccagagactatgaaagccagaagagcctggacagatgttatacagacactaagagaacacaaattccagcccaggctactatacccagccaaactctcaattaccatagatggagaaaccaaagttttccacgacaaaaccaaattcacacattatctctccacgaatccagcccttcaaaggataataacagaaaaaaaccaatacaagaacgggaacaacgccctagaaaaaaacaggaaggtaatccctcaacaaacctaaaagaagacagccacaagaacagaatgccaacttttaacaacaaaaataaaaggaagcaacaattacttttccttaatatctcttaacatcaatggtctcaactcgccaataaaaagacatagactaacaaactggctacacaaacaagacccaacattttgctgcttacaggaaacacatctcagagaaaaagatagacactacctcagaatgaaaggctggaaaacaattttccaagcaaatggtatgaagaaacaagctggagtagccatcctaatatccgataagattgacttccaacccaaagtcatcaaaaaagacaaggaggggcacttcgttctcatcaaaggtaaaatcctccaagaggaactctcaattctgaatatctatgctccaaatacaagggcagccacattcattaaagaaactttagtaaagctcaaagcacacattgcacctcacacaataatagtgggagacttcaacacaccactttcaccaatggacagatcatggaaacagaaactaaacagggacacactgaaactaacagaagtgatgaaacaaatggatctgacagatatctacagaatattttatcctaaaacaaaaggatataccttcttctcagcacctcatggtaccttctccaaaattgaccacataataggtcacaaaacaggcctcaacagattcaaaaatattgaaattgtcccatgtatcctatcagatcaccatgcactaaggctgatcttcaataacaaaaaaataatagaaagccaacactcacgtggaaactgaacaacactcttctcaatgataccttggtcaaggaaggaataaagaaagaaattaaagactttttagagtttaatgaaaatgaagccacaacgtacccaaacctttgcgacacaatgaaagcatttctaagagggaaactcatagctctgagtgcctccaagaagaaacgggagagagcacatactagcagcttgacaacacatctaaaagctctagaaaaaaaggaagcaaattcacccaagaggagtagacggcaggaaataatcaaactcaggggtgaaatcaaccaagtggaaacaagaagaactattcaaagaattaaccaaacgaggagttggttctttgagaaaatcaacaagatagataaacccttaggtagactcactagagggcacagggacaaaatcctaattaacaaaatcagaactgaaaagggagacataacaacagatcctgaagaaatccaaaacaccatcagatccttctacaaaaggctatactcaacaaaactggaaaacctggacgaaatggacaaatttctggacagataccaggtaccaaagttgaatcaggatcaagttgaccttctaaacagtcccatatcccctaaagaaatagaagcagttataaatagtgtcccagccaaaaaaagcccagaaccagacgggtttagtgcagagttctatcagaccttcaaagaagatctaattccagttctgcacaaactttttcacaagatagaagtagaaggtactctacccaactcattttatgaagccactattactctgatacctaaaccacagaaagatccaacaaagatagagaacttcagaccaatttctcttatgaatatcgatgcaaaaatcctcaataaaactctcgctaaccaaatccaagaacacattaaagcaatcatccatcctgaccaagtaggttttattccagggatgcagggatggtttaatatacgaaaatccatcaatgtaatccattatataaacaaactcaaagacaaaaaccacatgatcatctccttagatgcagaaaaagcatttggacaagatccaacacccattcatgataaaagttctggaaagatcaggaattcaaggcccatacctaaacatgataaaagcaatctacagcaaaccagtagccaacatcaaagtaaatggagagaagctggaagcaatcccactaaaatcagggactagacaaggctgcccactttctccctaccttttcaacatagtacttgaagtattagccagagcaattcgacaacaaaaggagatcaaggggatacaaattggaaaagaggaagtcaaaatatcactttttgcagatgatatgatagtatatataagtgaccccaaaaattccaccagagaactcctaaacctgataaacagcttcggtgaagtagctggatataaaataaactcaaacaagtcaatggcctttctctttacaaagaataaacaggctgagaaagaaattagggaaacaacacccttctcaatagtcacaaataatataaaatatctcagcgtgactctaactaaggaagtgaaagatctgtatgataaaaacttcaagtctctgaagaaagaaattaaagaagaactcagaagatgggaaggatctcccatgctcatggattggcaggatcaacattgtaaaaatggctatcttgccaaaagcaatctacagattcaatgcaatccccatcaaaattccaactcaattcttcaacgaattagaaggagcaatttgcaaattcatctggaataacaaaaaacctaggatagcaaaaactcttctcaaggataaaagaacctctggtggaatcaccatgcctgacctaaagctttactacagagcaattgtgataaaaactgcatggtactggtatagagacagacaagtagaccaatggaatagaattgaagacccagaaatgaacccacacacctatggtcacttgatcttcgacaagggagctaaaaccatccagtggaagaaagacagcattttcaacaattggtgctggcacaactggttgttatcatgtagaagaatgtgaatcgatccatacttatctccttgtactaaggtcaaatctaagtggatcaaggaacttcacttaaaaccagagacactgaaacttatagaggagaaagtggggaaaagccttgaagatatgggcacaggggaaaaattcctgaacagaacagcaatggcttgtgctgtaagatcgagaattgacaaatgggacctaatgaaactccaaagtttctgcaaggcaaaagacaccgtcaataagacaaaaagaccaccaacagattgggaaaggatctttacctatcctaaatcagataggggactaatatccaacatatataaagaactcaagaaggtggacttcagaaaatcaaataaccccattaaaaaatggggctcagaactgaacaaagaattctcacctgaggaataccgaatggctgagaagcacctgaaaaaatgttcaacatccttaatcatcagggaaatgcaaatcaaaacaaccctgagattccacctcataccagtgagaatggctaagatcaaaaattcaggtgacagcagatgctggcgtggatgtggagaaagaggaacactcctccattgttggtgggattgcaggcttgtacaaccactctggaaatcagtctggcagttcctcagaaaattggacatagtactaccggaggatccagcaatacctctcctgggcatatatccagaagatgccccaactggtaagaaggacacatgctctactatgttcatagcagccttatttataatagccagaagctggaaagaacccagatgcccctcaacagaggaatggatacagaaaatgtggtacatctacacaatggagtactactcagctattaaaaagaatgaatttatgaaattcctagccaaatggatggacattgagggcatcatcctgagtgaggtaacacattcacaaaggaactcacacaatatgtactcactgataagtggatattagcccaaaacctaggatacccaagatataagatacaatttcctaaacacatgaaactcaagaaaaatgaagactgaagtgtggacactatgcccctccttagaagtgggaacaaaacacccatggaaggatttacagagacaaagtttggagctgtgacgaagggatggaccatgtagagactgccatatccagggatccaccccataatcagcatccaaacactgacaccattgcatacactagcaagattttatcgaaaggacccagatgtagctgtctcttgtgagactatgccggggcctagcaaacacagaagtggatgctcacagtcagctaatggatgggtcacagggctcccaatggaggagctagagaaagtagccaaggagctaaagggatctgcaaccctataggtggaacaacattatgaactaaccagtaccccggagctcttgactctagctgcgtatgtatcaaaagatggcctagttggccatcactggaaagagaggcccattggacacgcaaaatttatatgccccagtacaggggaacgccagggccaaaaagggggagtgggtgggtaggggagtgggggtgggtgggtatgggggacttgtggtatagcattggaaatgtaaatgagctaaatacctaattaaaaaaaaaagaagcacatagagggtgcaagggtgaggggttgcggtggggaaatgaacagtaagtctcagagtacctactcctcttgcagaagacgcaggctcgtttcacagctgtctgtaactctacttctaagggttctcatggctttccgagcctctatggacattgcacacacatggtacatatacatgcatgaaggcaaaatatttacaccataaatataaatgtaaaagattgtctctgttaagtgtgttgttggctatagatttttgtagtttctccttagattaggaaaagtttctccttagattaggaaagtcttctattgctagattgctgagacattgatcacaacggggcacttatttcgtcagacttttttttttttcagaattttttgtttgttttttgtggacagagtgccatccctaatcagtaagctatttgccattgatacctactgggaaagggaaaaatcatttttctctaatggagtgacactgggtatgtatatcaaccacactccagggaaggcgtagttggccaacacaatccagattcatgttacttgtgtattcttgtttggttggtttggtatttttagccatcttatcttatttttgagaaaattatgaatgtagggcgatgggaataggggaaaatatgatcaaaacatgaaaaaaaattaaaaagccagtaaatacaacttttaaaaagttatttgggagctgacatgatggctcagtgggtaaaggtcttgctgcccaatgatgatctgagttcagtcctcagaacccaagcaggaggaggagaaaacaacttcataaagttatcatctgacctatatatgtacgccatagcatagacctgcccccacacatcacacacaacagtaaagttaaaaatgaagttttttaattcattccactgattaaaattgggcttttggattgatttgaaccaatattgatttctgggctcttattattagagcaaattatcctttttatgttttaagtttcggtgagatttaagctgttgttcatagatggtacttacatagttttaacctacttagttcttaaactagaatgattgtatgtaatgttacatgaattcatttatatgtgtacatttagttccatgcagtgtagtctaatatttattttgacaaattaatgttaattttagtttactaattatggatttatgtggttaaaacataaaattccaccacatggattgtttgtgccacctttttctttactgctataaccctgacaaccacaattctgttcttaacacagggttttgtcacttcagagatgtcatatattggttattgtggcatatgactatattctaaactatctagaagaataagcagctggaatatttaagtccataagtttgataccaacctggacaaatacacacctgtctcatatactcctgtgttatatagacacataatgtgtgtaaccttataaatgatgatatttactatttcagattagatttttatttggcataattgtcttgaaatacatctaaattatgtacatcaataatttattcctttataaatgtataaatgtttatctgttcatctgtttttagatagttcagttgtttctaatttggggttaagaatcaggctatttgagtcacacctttgatgccagcacttgggaggcagaggtaggagcatctgtccagtttgaggccagcgtggtccccaaagtgagttttagggtagtcagagcctacacagtgagacccagtgtgtcttgtatacgtgtgcagtagcatgtgtacagaaaccaaaggataactttttagcagtcagttcttgcctttcttctgttgttttcaggtatttaactcgggctatcaatcttggcacccagtgcctttaccatgtaggctgtttcctagcccccacaatacataagcatgttcttggtatgtgcaatgtattagatgatatctgtcgtcttacttggcttgaatagcatgacaagttggtaactttaaaaaggccaaccagatagggctcacttgcttcctgaaaagcactagtggttgtgtgctgggagtgcagatgtggttatgaagtcctgggtgagttttcatgccagagctggaagttcagtggacataggaacgtctgatagcatcccgtcttacagactactgttccaggtcagaaatgatggatttcgcttactcctgtggtggagagcagttgttccctgtgtgctttccctctggtggatttgtaggcagtcagctttgtgcaagtcatggtataaaccttacttgtttacctgctgtcttgtggagtgagagtcagatttgtgcagtgttaagagaacaatagcagcggcagcattgaggttgcgcttttttaagttctttattttagatactgcttctcggctacatacacctttcttttctttttttcccttttccttttgatattatttcttttattctgttataggagctttttttgttgtttgtttttaaaaacgtttcattggttctttgtgaatttcacatcattcaccgcagttctccctccctttatccctgcccttcacccaacaaaggaaaaacatattctcattgtggaagctgtagtgtgtcatagtgtgtcccatggtatatataaccttttgtccacacttctttgcttgccggtgttcattacagtgactaaatggtctagtaggaggcctttggcttctgctactttatcaatactggaccctcactgggatttcttttggatatcctgttgttgccctgtgtcataaagattctgtagttttggatctgtgggatgggttccttcatgcattccagtagttcatcaatggggtagatagatgttgtagtgggtcaattggatctgggcctgagagatactacgctggtcagcccacaggctctcctgctttcacactggctctcacacccccagggccagctcaccagcaactcccccaaccagagccagctctaccctgttgcccaggagaggggcagggcctgtcttcctgagtgttgcagctggtgagagaaatggtcagttctcccactctcatgaccctgaggccaactctcccacttgccatagatggccagagaggaggagggcatatttccctcttccaggagaccgcccagcagaccaaagatgggctggctttcctgggctgaccccatggggttggggacagctcatctgcagcctccacatcctgggccagctctattgtgatgcccaggtgaggttcaggaccctggagcacttattctctcaagtgctgcagcaggttatgggcaaagccagctctcctgctctcatgaccccagggctagctctcctgcctgccaaggtggtgaaggataaaggtgtttctccttcactcaagccactgccactgcaggggagatgagtggtagggccagttttctcacactggtatcctagcagctggctcagctaaaattctcacagtgtgggtggggtcagttctcttgctctcatgcctccagagccagctctcccatgatgcccagataaagagtggggccagttctgcatagtccttaaacatcactatgtcctggttggcagcacagatcaaagggtgtctgcctggcctttgatggtaacagacccctgctactgcagggccatagacccagacatggtccccagtgacagcataggccaggaccccaccatgatcccagatggcatcaccagctactcacatcaggctgttcatcactacccttgagtctccagttctgcctctctttattgtgcccttgtgcttctcttccatttccccaccacttgcttcctttagtagccactggggtctctgactgtctggggttgtcccaggagtactgtgctgcactatgcattatggtgctgggccaaggtctgggggacaccagactggtggtcatctctggctagctccctgtctaggccccatggtgctggtctggtggtcatctcgagctagctcctcccctgtccggcccaagggaccccttttgagggttgtctttctcaggctcaccgtccccaccccctttcccagagcccaccaggcatggttcttctaattgtaccttgcttcccatcctggcagcctgtcccagcctgtctgggtgcaggattggtggttgtttcaggcttgcttttttcagagtgttaggctactaatcattcagtgttcatacgtcagaatatctgagcataggcatagcctctctcttccctgccgtatgcagtagccatacctgcaaggcctctagggacatgggtgcaagaaactgatttccagtttatcattattttttatgaactgcactttagtatcatgccatgatcctcaaaattttttttattaggagtttttcttaaaattttacagttttgtacttcaatctaggttttattgtgagttaatttttgtaggtctaaagttcagttcaaaattaattaagggtatctcactcagtttattgaaaaggttctttttctttcacaaaatgtatctgagtctgaattttctcatttgttcttgtgtcctttgagaatatagtagtgtcttgtttctatagttacacagtgtgctttaatatcaggataaagtaatttctccttcagaatcatttgttatataagcttatccatatgtccagattcattgctggaattttgacagttgttgatgaagggaaactgatatctttattatcccgagtcttgtacttcataaatatgatgtgttactccattaatttaggactttaataaagttataggtctcattatgtgagtttttatgtttatgcttaaatgaaaagcttaggtttctgtggtgcacttgtgaatagtgtcaggtttaaattcagttttcacgtgttcactgttactaaataaaagtgtgattgcatagctggttaaggaggctcaggtgtgtaatcctcatgcgtgggaggtagagacaaggaggatctgtagtttaaggttattcttagctatgtagagttgaaggccagtctgccttatgggaaaccctgcctccaacaaaattatccaggcaaaacagcagcaaaataactgcttctgttgatctgcactcaactcaaacattagtagtgaacgagttttaaaaatatttctaaagattttgtatgctgatattcttttcctataggaaagtgtttcccttattcaatctgcattttaaattcttccttgtgatctagaaaaatggcttagcagttaatatcacaggctgttcttccagaggacctgggttcaattcctagcacccacagggcagctcacaaccatctgtaaccccagtcctagggggatctaacaccattttctggcttcctcaggcaccgtacatatctacatacatgaaggtagatactcacacaaaaaaataaactaaaacctaaaaaataaaaaattaaaggtcaaaataaaggttaaaaattaaaattaatttttttattattacataggctaaactcagtactgactttaataattgtagtgaaagtgaacattcttgtcttgtttttgattttactattgcatacagtataagttatagttttcttgtttgttttaattgatattctttactaagttgaaatcttccttccatgcaaagcttactgaaggcatttaatgtgcatgggttcagtcacagaaacagccacgtgttactgtaatagcacactaaccaaactggagaggaaagcatttatttggtttctgtcattgctctagaagcagtgggacctaggaggatggagttgataaatgaggcagactaaagtctcatgcaattgtaaactttattcagagcatcagacaatttatactctgagggttaagaaagttcacctgagtaaagttctcatgaaaccaaactgtatacaaccataaggacaagctataagtggcaaaagtgtttttccattgagacatatataggatgttataaacatgtaattgaataccaacagcaagcagtgctgagtcatctgaagtacactcagttctgtctgtctgagagggacaaaagcacattccaagaacaatcccatattttgaagaaattgaggtcacaggctcttgtcttgttttcttggagtgttctcacaagcactcataattctcctcatacaactttattcctggactgtcctgacaggcttataggttggagtctgtcataaagagaagcagagtcaatggcaaatgccttagcttgctttcagagtggcttttttatacagccaaagccacatgccagtgggtttcatccctcacagtgagttgggctgtcctacatcaatcttaatccagaaaatgctacatagatatgctcacaagccaacaagtgaggtagttcctcaattgaggtttctttctagatgactctttaagatttgtgttgctgacaaaacctaaccagcacaactggtacaagcatacacgtaaagatgagtcttgaccttattattgtgggaccttattaaagagatttgtagaagttgttctctctgtatctgactctgggacttgacatctatataggataggcagttatgtagaagtatttcttagagcgttctctctgttctccttgtactgggataactggagggtgtttctatgccagttctagctcgttttagctctcaaataaagacatggagacctggtatatttactaacaagctgcacacactaagctggacaggttctgatctaacccaactaggtgctactacccagccaaatgtcctgttatttgctatttggtcttggccctagttttctctggtctatgtgtggcctcatggttgctttctcatcaagatctcaaggcaaatcatcctggtctctctatgtggttttttcacacctcctctctcacttttttctggtctccttgggactccctgaccagatcagacagcggtcctgccctgtcctcctgcccagctgttggtagatcagcactttattaaccaaccagaagtggtgtaaacaatttttacataacattgagactggagatgcttgaccatgtcatcatctggacagcaaccaggtatctgggcatagaattcagtattgaatacacagcgcacaaaaccatcctccaacacagttgggaagggaaggtagtgtaaagtggaaggaagcaaggacaagcttgaatattgaataccaatatctgtggtgttttactttcatcttcccaaattttatataaatatgactgtctatcatgtctaatgatagagcttgtcccctttataagcacaagctagatctcttaagacatagactgctagacattaattagattggagaatataatctaggtggacattccgtaggaaaaaactatatgctcttttaatattgagtgtacagttggctcagaatttgaagaaaggatgaaccacagggaagtggtacagttacaggactagttgtgccatttcatcaaggtgagtcaacagctagccgcatttgtgagctttgagagcatctgctccaaccttctgtagacacaaaccaatactgatggtgtttttctttcatcttcccaaattttatataaatatctatcctgtttaatgatagaattcattcctgggatgaattctgggaaacatggtttagattaactgagataaagcaagttcatagttaaccatatatttcctttttgattattgaatggaaacttcattgcaaagctggaaaggtgcctttccccactcattaaagataggtgatttatgccctcatccactggtacttcatctttgcctgaaataaggctgttttcaaggtgtattaattattctctgacttttgtgataaactaccctgacaaaagcaacttaagggagaagggattggttttgtgcagttaatagttcatcacagtgagaaggcttatagtgtcaagggcttgagactgctgggtatgctgtatccaccgtcagaaagcagggggagatgaatgcgtgtgctcagccagctttcttttcatgaagtctaagacccaagcccacggaatggtgctactcaaatgaagagttcgtctttcagggctagagagatggcttagtggttaagagcatttgctcttccagaagacttcaggtccattcttcagttgtaatctaaactcatttattatatacacaagatcaactcaggttctcttaaggtggtaggtgggtttgggagacaaggagaccaacatgaatttaaagctcatactacttgctgtgttgtgtgtggtataatcctttccctctgacttcagaaggaatggtggggctgggaaagtggtgcagtggtagagtgattgcctagcatgtgtaaggtcgtggacttgatcactgattcttgagagagggacagagaggagtaggagggaggagaaactgattatctaagtatgtgtaatttttaatactgttcaaaagtttattttttcccagtgattggctcctttattcattaggtgactggttcacatgaacagcaccaggcccatccacaacacttccccctctctgttctaataaaaacaaaatctttctctcaaatataaatagagcacaactattaccattttgtaatctataaagtataagataatcctaacacccagtccatcatttatgtcattaagatagaacattgtcatctgtccccaaattaaaagacttatgattctaccgtgacttatgtcctggctttagatagtatgccatctgaaaaccatcctctcaaagtaaatagtgtgggttggctatgagactctaggtagtttttcaaccccatcagaaatctgagaatgaccaacattaactgaaaatatataggaagtctaacaccgctttcagaactgaaacaaattgtagagacaactgcctacctatacagccccagtaagtcaggaagatggaacatgtgttcagccttctggcccaggatcatctgacagaccttagagatacaggaatattaaggactagcttactctgtcttggcagaattaagctgtcctaacctgtaaattgtgtcctttcaagaacagtacaggtttgtaggagagattggcgatttcctgcccagtggcaacctagccacaaatgtgcagcttcacctggaggtaagatgctcagttgctattttgaatccatgaatgggaagccaatttgtctcaacaagtgaataaataacattaactgtcacattctgtggaattctgacgtttttgaaaaccaactatctatataaagtaatctggactcttctctgttaactactctcaggtatttctaattaacatctctgaaaacaccctaataataaactcagagccacagatttgctatttggcccttaactcacaggcttaatcatctcaagtcagtttataaaaacagttgtagaaggactgggtctaagccctgtactttaaaattttctgtatcaatagaagaaatctacaccaatgaaaaccttgatttttgcatcaaaagcaattctgtagcaaaataagaaattacgatttcaacttagtaacaaataaaaagatttatgccgccgggagtggtggtgcacgcctttaatcccagcactcgggaggcagaggcaggcggatttctgagttcgaggtcagcctgctctacaaagtgagttccaggatagccagggctacacagagaaaccctgtctcaaaaaaaaaaaaaaaaaaaaaaaaaagatttctaccaaatgaaattatggctatgaaatcaaccctagctattcctccctgtttcaattataaccatttctatattccctagaaatataacctctaataaccacctccagccccaaagcccaggaaactggggcgatgactcttcataacttcttcaaattgaaatattttgaaggggagtgagaaggtagagaaaatgggggagttggttggccttaagaaggccacatcaatgattgattagtctttgatacctgtgtcctgactggatccatcaggagttcaagaaggtcagttcagcatgtctgatgatgagattcaccaaggctatatattctgtaatatgcaaatttcaaaacaaaattttagtatcatcaagataatttttttgtttgattctctggaatctagttcttcagggggtctccctctatcaaatctgatccatattactctggaaggtgtatagacactaatcccatattctaaaaatgcagagacaaaacctttcccccaaatcagcatatccatgagccagtaaccagaaaaacctttattttgacctctctcctgtggggcggtgaactgtgcacaaacagcctggtcccagtagagcatgggccttgaaccccagagacctggtgagaggtgacttctgccttcaatagacagtaggattttggccatgcctcctgggcccctggctcctgtagcaactacagcctcccagagcccctcacccccaccccagagaggtttgtggccatcagtcaggtaggagcagcaccaagctcccccccccccatgcaaataaggtttctccagagctctcagagcaagtcaatgagaaatactccttatcaatccttgacccaccccaaaactgtgtataagaatcctatctggaaggattaaaggtgggtgagaactattccgttgtccgagagcacttctgttcctaagagctgtaacacttgggaagaggtctgcgctcttcaaaataccacctgaagctctgccacaagtgaggagactcagtgcagggtggcagagtaaccaagtaactgggaaggcatagcagaggcagaggtggaaccaatctcagcagaggaagtgactttcctccctgtctacacttgcttccctttgctggaactctcacaccaggccgggccagggatctccgtggaaaacctctggtgcacaggcccacactctccgagaagactcacataaccacaaaactcaacatcacaccaaaacaatccaaaacaaatgaagtaaactaaaatactgtatgtgcctattcttaggtcttttctattttgccatgcagaataataacccagaattcccatggagcccatgttagacagaatttgagtatcctgtgaggcgtattagagcaatatatctttataccaccttaacatagttgattcacatttctatctgtacctacttataagcaggcagctagtcaaaacagaatttaaacctagaattcctgtggagccctcgttagacaggatttgagtatcctgtaaggtgtattagagcagtataatttaataccatctttaaagaaattaattcaaactttcactaatacctgcctataggaagcaattagtttttacttgttaaactctctgcctagagcagccatcttgttatactgtttatctgttcggctttctgcctggagccacagacatttattttaccaatacctgttcactgccatctctacttgaagtcagtgactaattttccctatcctagttctgaaccgcaggcaaaattccccacgtgatttggacaaaatctgtatataaatctatcctaaaagcaaataatcccaattttataaattcacagttaatcaatttctgccttaagaattaggcaacttccattctacagctctctgactcagagtagcctgcatttcccacagcagcagacctcagaacctgccagcagtttctttgtttcaattcctgagcttgagttgagtgcatgtgactcatctcacatgactcctcacagtgctgccttgctacttacttaaaaaaagaaaataaataaaatgaaattcaaactctcaggctaataatcttaaatttctaatggattcttacccaacatgttggtttgccacctgttgcaggaaatattaaaaaataagaacgggcacatgcccacgcttgtgcctctgccccggcagcctggccagccatgcactggtggacaatggacgacctgtttttatctcatggagattctaacactgagctccacaatctttccactcagctccctaggttcctactggtgggtcacgagtacaccagccctgtgcttcaaatccccccacggcctttgtggagcatatctggcaaacccatgctttgctgccgtacctttctctcttgaaccctgatgagcctcccgtgtgaaggaaaacgcaacacaaacttagttctgaaacaatggtgtaactcaatctctgggagcaacaaccaaaacctaatcttgcaaaccttattaaaatctgattcttcctgtggcgaatccttgtggatccagcatgataccaagaaactctagcagctacatcttacccctctgctttcccattccaaaagggttaaaagagtttaatatgaaataactcaggttttttaaacttgaagcttattttttggtcagttttggcttctgaaagcacatttttgtgggatatctagacaacaccatcagtttgtgtccagattcacacaaaagtattattcaggaattatttatttaatagtatcacatgcccttctatgtgagggctcttgcagaacaactcattttattttccatgtttttatgacctaccaccattttgtttagatcaaaatggctatgtctagacatttaaattcagactgtacattttaaaaaaatttttcaaatactttagcatttactacttgtaattttatcacattattaaattgagcacctttattactttaattcagatagattaccaatcccacctttggcaaaaaggaaaggatttaaaaaactttttttctgtctcttacatttttattttttaaaagactgaaaataagattcaaaggctaattataggcatagaatatagcttggtggtagataatcccttacttagcatacatgggtggggtgggacagggaattttaaaaaaagaacagtagagcaatgtggtttataagatactgaatttcttagtttttttatctttaaaatcaattatataagcatgacacttataatattttaataaaacatttatatttatagagtcacttaatacactatatatgacatagcaaacaaaaggaaggaaaaagatactttccctacacaattcatgacatatacctgttgcacagtctctggtatttgcttcacaaagttttaaaaggtaaaaatcttatataaaaacagttattttttttatagtcaagggctttcaaattacataccatgatgttctgtttaccaatgtatattgcatagaaatggttttatcaaacactttaatatttaaaaaaacattaagaaaccagtttttaaatggctgctacactttaaacttgctaattcaagattcatttatacttttaaaatatacatcctgtaggtatgaaagtttattctctctctctctctctctctctctctctctctctctctctctctctctctctctctctctctctccctctccctccctctctccnnnnnnnnnnnnnnnnnnnnnnnnnnnnnnnnnnnnnnnnnnnnnnnnnnnnnnnntctcccccttccccccctccccctctccctccccccctttctctttcttttctaagacagggtttttctgtgtagttcttgctgtcctagaacttgctccttagaccaggctggccttaaactccacctgcctctgccttcctgctgggattaaaagcatctgacaccaccacctggcctaaatttatattttcaaatgtgattgctgtaagaactatcccattgatatattttggtaaactaagctacctttaaaaaaaaaaaagttgtgtcctggcgagatgattttttttttttttttaagaaacaaggacagtaatgaagtcagcattttttaagtaccactacaaagacatacataaggcatcacagaaataataaagtgcataaaacagatgaagcttccttctttctttctttctctctctctctcttttgtctctagtgcagggatccggtactcaaatacttttagactgtcttattcaagtgcttctttatgtaatttatcctttaacttgaacattctgttcctgaaaaaaaaaaagacattttaaggtattaattttgacctcatgacctattataatttttaaaatacatggaattctatagtcactcccttaccccattctaaatcttacacacacacacacacacacacacacacacacacacacacacacaaatatatatatcctcaggatcataaaatatttaatgtttataagcttaaaaattactgaatgttaatacagaatacattaatatctataattggaatcacagaacaaatccttcctaggtaacacctataattaatttaaaaaatctttatgtttatcctttacctagccatcataacacttaaaaataagaaggaagggatggtggtggcacatacctttaatcccagttctcaggaggcagagacaggtagatttctgagtttgaggcttccctggtctacagaatgagttacaggacagccagagtcacacaggaaaaccctgtctgaaaagaaaacaaacaaaaaacaaaataaaacaaacaaaaacccccaaccaaacaaaagagaaacctaaagtgaagaagtcaaacaaattaacttgaggatcttttctttgaatggcaagaaagtgtgacacagaagcttctccttcatgacagaatgtagaatttagtataatcttggtaactcagcagcctggttattcaggtaattgtggctctttgttatgaattcacctttcattgcaggtgctgactaagcatgctttctggtctatctttggtaaagatgattcatttcttggagacatttatcatttttcaaaaatggaacttaaccctatttttgcatcatttaaactatcttgctcttaatggccattcaggctggtttttcttatacattttctactatatatttgtttaaaatattgatgactgaagcgatagctcagcagttagagcacttgttgttctttcaaagaacctgagtttgtacacagtgttcatacatacttgcaggtaaaacacttatgcacataaataaaaatgtaaaactccttattttaaaattggtgcatcttattattactattttctaccctgtttaaaattaaaaacttcacacacatccctaccagccctctttcatcccttttattttttatttttctgctaaatgccttcataacagatacaccttttattgtcttttttattgcccaagggagccctgtatttcttgcttctagaacattatctggaacactatttgtaaagtgaatagatggagaaacaagaatttactggggttcagatgccgtgttgtcttttgtaagttagttatgttaataaggaaatagactgtagagggttagtttgtctaatactcactttataaatggtagagctaaaattagatgttgaatcatttgtgtcaggttgtacgctcttaatttcaatgaagattgtatgatttattgaattcattctttttaaacaggaagaagagaatttatccaaagattaaaacttgaagcaactttaaatgtgcatgatggctgtgtaagtaatggttaactcttaactataaatggctttaataatgtctgtaataaatttctgatgaaatgtcctaatcttcctagaatggattaaactgacttttaagaatgggaaaataggtaagttatgatgacacacagttttaatccttgtatgtgggaagccaaggcaggtaataatcttgatttcaaggccaacctgactcacaaagtgagttctagaccagccagggctatacagtgagaccctgcccccatccatcttcctaccacacccccctatgaaagaaagaagaagagagagagagagagagagagagagagagagagagagagagagagagagagaaaggttaagaaaagaaacaagggggttagtgagtggtgggaataaaggttttcaattaaagcattaaagtgtgctagatgggtatttgtaatcccagtacatgtgagaaaaagaccagaggatcaggaattcaaggtcatcttcagctatgtagtgttcaaggccagcctgagacacacacaaacacataacaaaacacaagtatatttgaaattttttccctttgagaattttatacagtatgttttgaacatattcacatacacacatctgtgctccagcacattttttaatttagaaaagtgtgtgcaaggtttggttttgtggtgtctgaaggccacgtgcattttctcataaggcttccattttaataactctactgaagttgcttgtatgaaggtatttatgattctcatatctctatagagtccaagcttgcttcttagaaatttaactcattagaatttctcctcaccattgaaatgcttttctgctaatactatgtttttgttttccctctgcctcattgacctgctttgtttgtgtcttcttggcttactggtcttcttctttaaaataattttctaaaccttgtctcaaaaacaaaacagtttctaaaattacatttagattctctgtgtgtgtgtgtgtgtgtgagagagagagagagagagagagagagagagagagagagagagagagagagagggagagagaaaagagaagagagagagagagaagatagaagagagaattcttctgaactggaactcactgcaggctgagctatcgttgagtccgttatctgtcacagcttctcaagtgtgaggattttaggcatgcaccccatacctggcttctatcttatatattttacatcttataaccggaactctcttccacagctctgtgaagcttactttcatttatccctctttgaagtgttacttaacaggaaaaccttccctaattgaacagtatacttaatccacgtctttatgctagcttttctcattgtttactatatgtcattatagcatatatgaacatatatattcatagtcaacaaactggcccctacccctattcacacatttagactgagacacctcttcagagattttcttcaggaagatactaaatgaataaaatatccaggagaataaatatccaggaattcttagcatgttggttacttaggaattgttcactgaagagggtaagagtgtgctatatgccgggttttataagaccaaaccttttaccacatccaaagaaagattttcaaatgttagttgcaaataaatttggtattatctatatttctggcctttaattttttcttttaggtcttactgtgttctcaggtattttggagaagaaagtaaactttctcaccacttcaggcctcctttttatttgcctttaaacctgattcattatttgagtgggcataaaattctagattggacattattatgttactcagtaatattacaggctataaatgtgcagccttgcatctagtgtagctgataagaatgtctaatcagtttttaagttgattttgtcaattaacttatttgcattacaattttgatggagattttagaaggcttattgatgtagttgacttcacttttatagatgatattgggcactttcagagaccataggtaacggtacttagttaaaatgtacactttggtgaatttaaatgtatgtatatattggtgaagccatcaactcagctaataagtattaaccacctgcaatgagcaattcaccctttcatgtctcattaccgtaattacccctagtcaatcccttggtaaatttattttcatttttaggctgatcctggtgatagtgggttatcagttaattgtagtgttatttatattttctagaattttaatcagtggaatcatctaccactttcccactatgccacagatgaagctcaaagccctgtgcttgctgctcaagtgttctactactgagctgtgcacctctggccctgcattattttggtgtttaacttcttacttagaattactaagtttagacttaacttagaataatcattttgtggttcattgttgttgaggatgtcaagtagttatttgttattgctgagtgttcattgtataggtatactgtaatttgactattcacctgctgatggacattgtttcttactggagactaggaagttatactggttttttattcttcttgatagatactaggagtagaataaataaatcatatagtagatgtatatttttgtttgttccgttttacattaaaaaaaacaaaaacggggttttttggtttttcaagacagggtgtctgtgtagccttggctgttctggaactcactctgcagaccaggctgcctaggtctgcctgcctctatctctgcctcctgagtgctggcattaaagttgtgtgccaccactgcccctgcttgataaggccttgcttgataggtagccctggttaacctagatcttgctctgtggcctatatgtttgtccttggaagtcagaggcattgcatcctcttagagctggagtcagttacaagtcattgagagaggatcagagtaggtgctggcaactctggtcttctagaagagcagccagtgttcttaatgttgatttttctttctagccatattattttctctatatggatccaaattttcccacctgttaattttccctttctctaaagaacttcttaaacatttcttgcacggccattttcctagagacaaatgttctcaatttttgtttgttggagagcatctttatttagtgtaattttgaaagggtgagtacagattttcttgtgaatgtttgttgtctctcagcactttaatttcattctgtacttcttatttgcatttctgagaagtcagatgacattattatcttatcctctatggataaggattttcttctggcttctttcagattgttttctttatctttgattttctttagcttgaaagatactcatttatttgttatgtaagaaacacagttctcacctcaaaacccaacaagagtttattctggagccagatatgaatgatggtggcccaggaacacagatttagacatccctgaattccatggtcaatgcagtaactgtttcctgaaatctttatagtaacagaaaaaagacaattgtaagtcagaagacacttaaaaaatatgtcagcggtcaggtgagcatagtaaagtgggggaaagcgcggtctcaggctgtctctaggttttaggtgttacctgatcattgttagctttgggttggtggaagctaagttaacacatttgaaaaaaaagatttatttattattatatgtaagtacactatagctgtcttcacacacaccagaagagggcatcagatcccattaccgaaggttgtgagccaccatgtggttgctgggaattgaactcaggatctctaggaagaacagtcagtgctcttaaccactgcgccatctccccagctcagttaatactttctaaaagttttcccctgatagtcacaaggatgttagatcagaaaagtgtgggcaagggatagctacaaagggagctaaagatagcccaaagtaaattgtaatcagatgtgggacctgtagtgctccagcccctgcacatcactgaggatctgatcaggcaaccagcttttgtggcctctttccaggactttcttcgaatacttgatgctctttggttatttgttcttctcagcttcctctgagtaccctgaatctgtacttagctgatactattttgaaggcaattctgtcattatttcaaatatttctgccctttcttacgttagtcttttggtgttttccattaaacatggatcatgtaccttttgtgtttgtatcacagtccttggatattctagtggcttcccctctcccataccccaaactttgtttcctttgtggttttaaaggtttctgtatatcccaaagtcatttcttcaactatatcaatatgttattgagcctatcaaagccatcttcacttgtgttagtttctttttgatgtctagcattactctactgttctttttaagaatcaccctgtctgctttagatctcctattctcatctatcgtctactttatcagcgcccttagtgtgttgtaattcaagttttcttgcctagggattgttccctgcagagctttcagttcctctcaagtcaggacacctggtgtcctggtggtagcagtttgtctggaggatccaagaacaattgttgatttttctagtagtttcttgagccttttagcgtataacagtgatttcaggccttttgtatgtgaattgagaactgaagtctggtttcaacctataaactttctttcattgatagtagttttactagtgttgtaaattttgtaacactggtaagtgaaagacggcttacttctttttatgtccaatttgtttatgcttcttttctgttttttctttttttaggttaatacaatctgttggaatgacactggagaatatattttatctggctctgatgacactaaacttgtaattagtaatccatacagcagaaaggtaaagtggctaaatatgtataatttaatgttaaagaagctagcaaaaagggaattgtaatcataggatatgcatttatattagactatcatcttcattaaacttaattatgtaatttagacattgtcacatgtaggtaccacagtttcctttgggatatgtgaggttttttcttgtgtggtcagttggtggtttttgaggcaggatctcactatgtagctctggctatcctggaactcactatgtagaccaggctggccttgaactcacagagataccatgcctctgcctcctgtgggctgagattaaaggtatgcaaaactatgcactgttggaatatttaacatttaagttttcagtgtgctttagactctacaagagttaaatgttctttactttatccaagtggacaataggcaaataatctctctctcttttttttatttttttttattttttgagacagggtttctctgtgtagccctggctgtcctggaactcactttgtagaccaggctggcctcaaacttagaaatccgcctgcctctgcctcccaagtgctgggattaaaggcgtgcaccaccacacccggctcaaataatatctcaataactttattagaacaaaaaaagacattgtggggttttttctaaaacataaaggtgtttgagtgaattctacttactgctatttatttgtaacatattggaaataactttttgctggcatagacctacaatcctgacactttggaggtagaggcagaaggatcttaagttttagtctgggatacagtatcaagactgtgccccaaactagcaataactttgctccctgtgggctcatacaatagtatttatagtttactgtttgtgaagcaaagcactatccaaattacagctgttttttgatatttaagagcacttcaaagagtaaatattcacaacaaaactaatagcatacattatttaaattgtattacaagttttccaaatgaattgtggtttgaatctcaataaatctttgaatattataacattctatatgtaacatcttagggccctttcaggtattttaattttaaatatttagaagaaatattagaaatagaaaggaattttataattttgcagacgataacgataaaaagtagtactcttttgttaagaatatatgactgcttataattatgttaaacatgaatgtatcttaccaggaaaataaattaatgctatgaattacattttttgtatattttaggttttgacaaccatccgttcagggcatcgagcaaatatatttagtgcaaagtttttgccgtgcacagatgataagcagattgtgtcttgctctggagatggagtcatattttatactaacattgagcaagatgcagaaactaacagacagtgccaatttacgtgccattatggaactacttatgaggtacagggttgtgattatatgtgtaaatgcatgcttttgtgtaagtgtgtagatgtgtctgcatttgtttacacgtgcacctacatttttaggtatagcaatcattggtagattgtacttgagcattgcacctgagcatttctgaaagtttatcatggtagattttgtggataaacttaaaaattaaaattctagtattagtgttgtaagataaatttgcaattaaaaaccatgtcttagtcagattctagcttttccacccttttgtatttatttatttttaaattaactttacattagcatatcaaaatcatgggttttattgtggcaggtgccagcttttaaatacgctatttttactttgttgtatgggtttgtagtaggttttgttctctgaaatatactgccttacagggattcattcctgttatccttaccaagtaagtttattttttgttgttgtaacacaaattaaaaaaaaatttttttttgttttgagacagggtatcactttgtagcccttactggcctgaaacttgctttgtagatcatcctggtcctgaagtcacataaattcacctgcctctgcctcccaagtgctgggattaaaggtgtataccaccacccctggcctccctaaactctgtccccatccctgtcctgccccactcccctaacccagatatgttaattggctttttgagtcagagtttcctgtagttctcatggttttaagcttgctgggtagctgcagctgaccttgagttcctggtcctcttgcctgtcttttgtgtacagggattataggcagaggccagaaccccaggcttgagtctctctcctcactcaccttgcagccccagctggactaaagctcattatgtatgctaggctgacctggaactcaagatatgtcttcctttacctcccaagtgttgagattaaaggtatgtgccaccgtgcctggatagcttgaacctttaaaaattccaataatatactgattctagagagtgtgtttggggctggagaaatgactcagtgcttaagagccctcgttgctcttccagaggacccaggctcagctgccagctcccaggtggcgttcttagctgtctgcagctccagttctagggactctgacaccccatacaaacatatacgcagccaaaacccaagtgcacgtaaaagcaaacaagagtgtgttttcccttcttccataattttgttattgtttctgtttgtttagtgatttcctgggactgattttatagatttttgtattgatctttgtgtgtagtcactaaatctctatgtcaacagccagactgacacatttcctaatttgctttgaattcctagtctgtgtcaaaggtcatccgttagaaatgttttagtgattcatattgtaattgcgtgagtgaaacttgtttttccaaactaatgaactaattaaaggaattaaataagttgtatgaataatactttaggaaagatgtggtcctaagattttggtttatgggctggagagatggctcaaaggttaagaacactgaccacttttccagaggtcctgaatcccagaagcgatgtggtggctcacaaccatctctaatgagatctggtgcctttttctagcctgcaggcagaacactgtatacataataaataaataaatctttaaaaaaattggtttgtagacatagtatacaaagtgaaaaaaatgacattttatttaataaagtcattagacctgagtcagcaacaaattgcaaatacatttactgataaaatgacttaataagtaagtaattcaacactgctaactcgctaatgggatacagtaatcccgtttctcacaaatgtgaaatgagtcaaaagtcacagcttccatgcaccatgtattccattcgctggtattaatgtgctttttataattgccttatttatgccttactattttgtgttgattgtaaacttgttcagtaatagcaaagaaatatcaatacttaagttttagagaaaccaatacagtatatctatacatttaggtttaaacaacacaagtttattgtctaataattctggaagtcaggaatctaacatgagtcttgctgggctccaatccaagtgttaatgggtctgcaagcctcctgcctttaccttcgccacctctgtaacctttacatttgttttggattagggttccttactacatcttttaagtcaacagtcttcaaagcattctttttctgttggactttttccattatcatgtagtcgtttctgaaagatacaatcttgcctctctctttgattcttaaagacgcctataattattttaggtccattggataagtcagtataatctttctacttcattatctttaatttaaacatagttacaaagtttggaaaattttacatgaagttatattaatataatttcaaagtaactaatgattttaagaggctattgtgtctcttcatattctatttgaaatcgcttttggtaagtcatagatagttatatagatagttttcatggatgtatgaaacagtagcaatgtgtttcaaagtcacctgtttaattgtgcagtagtgtttcttgtacttttgtttcatcttcagattatgactgtaccaaacgacccttacacctttctgtcctgtggtgaagatggaactgttaggtggtttgacacacgcatcaaaaccagttgcacaaaagaagactgtaaagatgtaagaatccaagttttatacaagtgatgtgcaaaatgttatgattcagttagatatatttggtgataattttgttatgctaaaattttaatcacaaaatttttaatttaagtttaatgaagtagagaaacttctgtttcagttgtacatttaaatatatttctaggtggtaattagatgactcaatttgtaaagtacttgtgcaaagtgtaaggacctgaattttaaactctagtgcccatgtaaaacttggcctggcagtgtgcatctgtgatcctataggtagatcaatggagctcattagtcagccacctaactgaaatggtgaggttccgggctagtgagagactctgtgtccagtaatagggtatagagccattgaggaagacctctggcatcaacgtctggcttcatctatactcagtcatgtgcatgcatgtgcacatacacatgcagacatgtataaacacatatacatatgcaaaagtaaatgtgacagtttttccagtattataaaaacctggagaatttatcagtagacagtttgcaaaacagcagtggtaaaagtgggtgaaaacttagtatctttaactccgtcttttattttctttatttttggattgttttcaagacaggatgtttctatgtagccctgtcagtcctggaacttactctttagactaggctgtcctcagactcctgtctctgcctctgaagtgctgagattaaaggtatgagccactaccgcttggctctatccatcttttttttttttaattttttttaaaaattaggtattttcttcatttacatttccaatgctaccccataagtcccccgannnnnnnnnnnnnnnnnnnnnnnnnnnnnnnnnnnnnnnnnnnnnnnnnnnnnnnnnnnnnnnnnnnnnnnnnnnnnnnnnnnnnnnnnnnnnnnnnnnnnnnnnnnnnnnnnnnnnnnnnnnnnnnnnnnnnnnnnnnnnnnnnnnnnnnnnnnnnnnnnnnnnnnnnnnnnnnnnnnnnnnnnnnnnnnnnnnnnnnnnnnnnnnnnnnnnnnnnnnnnnnnnnnnnnnnnnnnnnnnnnnnnnnnnnnnnnnnnnnnnnnnnnnnnnnnnnnnnnnnnnnnnnnnnnnnnnnnnnnnnnnnnnnnnnnnnnnnnnntggtcttcgttcttcttgagtttcatgtgttttgcaaattgtatcttgtatctttgggtattctaagtttctgggctaatatccacttatcagtgagtacatatcatgtgagctcttttgtgattgggttacctcactaaggatgatgccctccaggtccatccatttgcctaggaatttcatgaattcattcattttaatagctgagtagtactccattgtgtaaatgtaccacattttctgtatccattcctctgttgagggacatctgggttctttccagcttctggctattataaataaggctgctatgaacatagttgagcatgtgttctttttaccagttggaacatcttctggatatatgcccaggagaggtattgtgggatcctccagtagtactatgtccaattttctgaggaactgccagactgatttccagagtggttgtacaagcttgcaatcccaccaacaatggaggagtgttcctctttctccacatccacgccagcatctgctctcacctgaattttttatcttagccattctggctggtgtgaggtggactctcaggattgttttgagttgcatttccctgatgattaaggatgctgaacatttttttcaggtgcttctcagccattcggtattcctcaggtgagaattctttgtttagctctgagccccattttttaatggggttatttgatttttctggagtccaccttcttgagttctttatatgtattggatattagtcccctatctgatttaggctaggtaaagatcctttcccaatcggttggtggcctttttgtcttattgacagtgtcttttgccttacagaagcttttcagtttcatgaggtcccatttgtcaattctcgatcttacagcacaagccattgctgttctattcaggaatttttcccctgtgcccatatcttcgaggctttcccccactttctcctctataagtttcactgtctctggttttatgtggagttccttgatccacttagatttgaccttaatacaaggagataggaatggattaattcacattcttctacatgataaccgccagttgtaccagcaccatttgttgaaaatgctgtcttttttccactggatggttttagctcccttgtcaaagatcaagtgaccataggtgtgtgggttcatttctgggtcttaaattctatttccttggtctacttgtctgtctatataccagtaccgtgcagtttttaatcacaattgctctgtagtacagctttaggtcaggcatggtgattcccccagagttcgtttatccttgagaagagtttttgctatcctaggtttttttgttattccagatgaatttgcagattgccctttctaattcattgaagaattgagttgaaattttgatagggattgcattgaatctgtagattgcttttggcaagataatcatttttactatattgatcctgcctatccatgagcatgggagatctttccatcttctgagatcttctttaatttctttcttcagagacttgaagttcttatcatacagatctttcacttccttagttagagtcatgccaaggtattttatattatttgtgaccattgagaagggtgttgtttcactaatttctctctcagcctgtttatcctttgtgtagagaaaggccattgacttgtttgagttaattttatatccagtttaggagttctctggtggaatttttggggtcacttatatatactaacatattatctgcaaaaagtgatattttgacttctttctttccaatttgtatcccctttatctccttttgatgtcgaattgctctggctaggacttcaagtacaatgttgaataggtatggagagaatggacagccttgtctagtccctgattttagtgggatggcttccagcttctcaccatttactttgacgttggctactggtttgctgtagattgcttttatcatgtttaggtatgggccttgaatgcctgatctttccaagacctttattatgaatgggtgtttgattttgtcaaatgatttctcagcatctaacgagatgatcatgtggtttttgtctttgagattgtttatataatggattacattgatggattttcgtatattaaaccatccctgcatccctggaatgaaacctacttggtcaggatggatgattgttttgatgtgttcttggatttggttagtgagaattttattgagtatttttgcattggtattcataagggaaattggtctgaagttctctatctttgttgggtctttctgtggtttaggtatcagagtaatagtggcttcatagaatgaattgggtagagtactttctgcttctgttttgtggaatattttgtgaagaactggaattagatcttctttgaaggtctggtagaactctgcactaaacccatctggtcctgggctttttttggttgggagactattaatgactgcttctatttctttaggggatataggactgtttagatcattaacctgatcctgatttaactttgttacctggtatctgtgtagaaatttgtccatttcatccaggttttccagttttgttgagtatagcctttttgtagaaggatctgatggtgttttggatttcttcaggatctgttgttatgtctcccttttcatttctgattttgttaattaggatgctgtccctgtgtctctagtgagtctggctaagggtttatctatcttgttgattttctcaaagaaccagctcctcctttggttgattctttgaatagttcttcttgtttccacttggttgattttgcccctgagtttgattatttccttccatctactcttcttgggtgaatgtacttccttttgttctagagcttttaggtgtattgttaagctgttagtgtgtgctctctctagtttctttttggaggcactcagagctatgagtttccctcttagaaatgctttcattgtgtcccataagtttgggtatgttgtggcttcattttcattaaactctataaagtctttaatttctttctttattccttccttgaccaaggtatcattgagaagagtgttgttcagtttccaggtgaatgttggctttctattatttatgttgttattgaagatcagccttggtccatggtgatctgataggatgcatgggacaatttcaatatttttgtatctgttgaggcctcttgtgaccaattacatgatcagttttggagaaggtaccataaggtgctgagaagaaggtgtatccttttgttttaggataaaatgttctgtagatatctgttaaatccctttgtttcataacttttgttagtttcactgtgtccctgtttagtttctgtttctacgatctgtccattgatgaaactagtgtgtggaagtctcccactattattgtgtgaggtgcaatgtgtgctttgagctttactaaagtctctttaatgaatgtggctgcccttgcatttggagcatagacattcagaattgagagttcctcttggaagattttacctttgatgagtatgaagtgcccctccttgtcttttttgataactttgggttacaagtcgaattttattagatattagaatggctactccagtttgtttcttcagaccatttgcttggaaaattgttttccagccattcactgtgaggtagtgtctgtcttttcccctgaaatgggtttcctgtaagcagcaaaatgttgggttctatttgtgtagccagtctgttagtctatgtctttttattggggcactgagtccattgatattaagagatattaaggaaaagtaattgttgcttcctaatatttttgttgttagagttggcattctgttcttgtggctgtcttcttttaggtttgttgaaggattactttcttgctttttctaggacgtggtttctgtccttgtattaggtttttttctgttattatcctttggagggctgaattcgtggaaagataatgtgtgaatttggttttgtcatggaatactttggtttcttcatctatggtaattgaaagtttggctgggtatagtagcctgggctggcatttatgttctcttagtgtctgtataatatctgtccaggatcttctggcttttatagtctttatacgttacttgactgttttccctttctacttttaatattctatctttatttagtgcatttgttgttctgattattatgtgtcaggaggaatttcttttctggtccagtctatttcgagttctgtatgcttcttgtatgttcatgggcatctattctttaggattgggaagttttcttctataattttgttgaagatatttgctggccctttaaaaatcttcattctcatctactcctattatccataggtttggtcttctcattgtgtcctggatttcctggatgttttgagttaggtttccaggaaaggtggacagatatctagtgttcggacttgcctcctggcataagatgaaggcctgaaacagggcttgtcccaaaatctgtgtagcttctgtagtccatactctcacctgcacagactagtctcgatggaatctggaacccaagatggcatatttgcattttgcattttctttgattcttgtaccaatgttctctatggaatcctctgcacctgagattttctcttccatctcttgtattctgttgctgatggtctcatctatgttttcagatttcttttctagggtttctatctccagcgttgcctcactttgggttttctttattgtgtctacttccctttttaggtctagtatggttttgttcatttccatcacctgcttggatgtgttttcctgtttttctttaaggacttctacctgtttggttgtattttcctgtttttctttaaggacttgtaattctttagcagtgttctcctggatttctttaagtgagttattaaagtccttcttgatgtcctctaccatcatcatgagatatgcttttaaatccgggtgtagcttttcgggtgtgttggggtgcccaggtctggctgaggtgggagtgctgggttctgatgatggtgagtggtcttggtttctgttagtaagattcttatgtttgcctttcaccatctggtaatctctagagttggtttttatagttgtctctggttagagattgttcctctcgtgattctgttagcctctatcagcagacctggaagactagatctctcccgagtttcagtggttagagcactctctccaggcaagctctccccttgcatggaaggtggacagatatctagtgttcggacctgcctcctggcataagatgaaggcctgaaacagggcttgtcccaaaatctgtgtagcttctgtagtccatattctcacctgtgcagactagtctcgatggaatctggaacccaagttggctcttctagatgctgtggtaaagccctccagggtggggggctttacctctcctctggcagagaaggtatctggatgtctggagcccgaaatgtggtctgccccagaagctctgtggcttctgtctgtcccagaacctgttagcctctgcagtccacactctcacctgcctagactagtcttggtggatttcgggaaccctagctctatccatcttttaaaagaagattttattttgttttgacttttaaagaaatagcatttttatcagtgtgttaccaatcaaannnnnnnnnnnnnnnnnnnntctgttagtctatgtctttttttgggggcactgagtccattgatattaagagatattaaggaaaagtaattgttgcttcctaatatttttgttgttagagttggcattctgttcttgtggctgtcttcttttaggtttgttgaaggattactttcttgctttttctaggacgtggtttctgtccttgtattaggtttttttctgttattatcctttggagggctgaattcgtggaaagataatgtgtgaatttggttttgtcatggaatactttggtttcttcatctatggtaattgaaagtttggctgggtatagtagcctgggctggcatttatgttctcttagtgtctgtataatatctgtccaggatcttctggcttttatagtctttatatgttacttgaccgttttccctttctacttttaatattctatctttatttagtgcatttgttgttctgattattatgtgtcaggaggaatttcttttctggtccagtctatttcgagttctgtatgcttcttgtatgttcatgggcatctattctttaggattgggaagttttcttctataattttgttgaagatatttgctggccctttaaaaatcttcattctcatctactcctattatccataggtttggtcttctcattgtgtcctggatttcctggatgttttgagttaggtttccaggaaaggtggacagatatctagtgttcggacttgcctcctggcataagatgaaggcccgaaacagggcttgtcccaaaatctgtgtagcttctgtagtccatactctcacctgcgcagactagtctcgatggaatctggaacccaagatggctcttccagatgctgtggtaaagccctccagggcggggcagacacctctcctctggtagagaaggtatctggatgtctggagcccgaaatgtggtctgccccagaagctctgtggcttctgtctgtcccagaacctgttagcctctgcagtccacactctcacctgcctagactagtcttggtggaattcgggaaccctagctctatccatcttttaaaagaagattttattttgttttgacttttaaagaaatagcattttatcagtgtgttaccaatcaaatttagtccatgtctcaaaaacctgtttacttactttttataaattaataatatttaaaacttataaaaggcctgaaaaagtcttttggccccagagagctttgttcaagagttctctggcatatagtatgtagagaacagtaaatcttcagagagttggtgaagtggtcaatgaaataaagaaattattcactttgtttttactaaaaagtaccagaaacaaaacaaagccaagaatcattcctaatcacgctgattacctgctaagtagccagtgaatccacactggaaaaaaaaaaaaaaaagaatatgcccttgaaactgatgaagcagaaaacaaaaagtaggaacaaattttgaacacaaaattttcatctctttagatatgttttatatatatgtgnnnnnnnnnnnnnnnnnnnnaataagttttaaatattgggtcttttgggaccagggttttagttcagtggtagctagcatgccaaaggccctgtgtttgaacctcagtattgaggaaaaatgtgtatacataatatcttcatagacacattttatatacattttcccaaagaattaaaagctgtttttaatattgtggagtgtacccctcgagaataaaagctactagggagagagaaccccttctccctgaggagtggcccagaggggagggggcaagtagaccacctgagaaggaagccgaaagggaccctgtgcagactcagggcagtgaacatcatcagtgctgggacccatgagcactgttagtggaacaggaccagggtgggactggctccagatatataaatgagaagggcaagagggttgaacagtgaggggctccaggcttcctagtgaacggtgggcactaaaactcattcttccaaatgcctgtaaaccaggtcttggtccatactttaggaagacacaggtacgcttttctaaatgacattctcataataatacaaggatgaagaagcggaagaattattttcttggtaaagcttatcatgtgtagtcaaagagtataaagaaagtctggtgactgtggaataattcccaactaccaagttgtttgaatcatgaacttcgtaaatgtatgtaatacaaataatattgtgaacttccctttcgactaaatatgttagaaataaattctaacagtctttaaaagtcaattacaagaaaaccattttgttgtgttttccctttttgtttttgctgactgaactagaatgtctgaggtaggttattttcttataattaagtggaaaatgctttaaaagtagactattcacgtttatatagctatatgtacctggtcttgcgtctgtcttttctaggatattttaatcaactgtaggcgtgctgccacatctgtggctatttgtcccccagtaccatattaccttgctgtgggttgttctgacagctcagtacggatttatgatcggcgaatgctgggcacaagagctacaggtgaggaaatattaagcaaaatttgagactgttcaaagaaatctttataatatttttacatttacatagtttttaactttcttgcattatttaaataatatagattattctaagaggaaaagtacgttactaagttttaactacgctgttgttggtaagtaggcatagtgctgtgtggctgtaatctcagtactctgtagctcgaggcaggaagatcagaagttcagggccattcctgtttgaggccagcatgcatgacatgagatctcgtctcaaaaagaaagcaagaaagactattgggatgatacttgcacagtttatcaattcataacaggcgctggggagagggtaccgtggataagagaatttgctgcttttacaggaaccagagcttggttcccagcactcaagatagacagctcaccacggcagcagatggcccttagccgtccgactctaggggatctgatatggaatctccttaggagagcacctgtacccaggtacataccccacccattattgagaatacaattaggtatggaaagatggcccagagcataaaagcacttttgctcttacagagagccccaagtttggttcctaacaccaactccagttccaggggaactcactcctgagggtaccagaaatgcatgtggtatgcacatgtcctctcctgcatgcactcacatgcatacactctcaagcaaacacttctacacataaaataaatctgagaagagatttataacaatgtggtggtgcacacctttaatcccagcacttgggaggcagaggcaggcggattttctgagtttgaggccagcctggtctacagagtgagttctaggacagccagnnnnnnnnnnnnnnnnnnnnnnnnnnnnnnnnnnnnnnnnnnnnnnnnnnnnnnnnnnnnnnnnnnnnnnnnnnnnnnnnnnnnnaaaaaaaaaaaagaaaaaggaaaaaaaatttgtttctttcccaaggctgccataataagttaccaaaatgacttttaagacaatagaaatgtgttttctttcatttctagagtttagctctctgaaatcaagatgtcttagggtagatctaccagagactactagagacttagggagaatctgttctgggcctccattttgccttttgataattgctgccaatttttggcaatctcacaagagcacttcagtttataaaaccagtatttcttgaaagtaattaggaggcatattgatgaaggaaaatggatttatttacgttttggccatactgtagagaaaagggttcctactttctctctgccttttctgtatcagtattataattttatagaaaggatgaaacaatagccgggaagtgtaggggtgtacagtgtaggcagaactatgcaaagtctctgtcaggaagtcatagtcatctccagctgtcaccaggattttagtctttcctgcctccaatgtgacagtcctagggaaattctaattctctgggacccattgttttaatcatcttaaagccacagagagacacaagaccatcttatttgctgcccatgcagttacaaaatcagacataaattcagcactgcagcaatattcacagcattctaagcagagtcaatatatgctacatttcattatgcccaagtccaagtaaagagattatgcatggatacatgtgcatgtacatttatacaacgatgagtaataaatatatattcacatttgttattaaaagtaaaggtggccttgggcagaaaccaccagtgtcagtaagaaccaacctagatatcaagtgggaaggaatactagatgagagtttttctgttttacttttaataaattttaattctgtgacaatttcacacatttatatgttttgatcatttttatccctccatttcttgctgttgcatcctctcactcacctgannnnnnnnnnnnnnnnnnnnnnnnnnnnnnnnnnnnnnnnnnnnnnnnnnnnnnnnnnnnnnnnnnnnnnnnnnnnnnnnnnnnnnnnnnnnnnnnnnnnnnnnnnnnnnnnnnnnnnnnnnnnnnnnnnnnnnnnnnnnnnnnnnnnnnnnnnnnnnnnnnnnnnnnnnnnnnnnnnnnnnnnnnnnnnnnnnnnnnnnnnnnnnnnnnnnnnnnnnnnnnnnnnnnnnnnnnnnnnnnnnnnnnnnnnnnnnnnnnnnnnnnnnnnnnnnnnnnnnnnnnnnnnnnnnnnnnnnnnnnnnnnnnnnnnnnnnnnnnnnnnnnnnnnnnnnnnnnnnnnnnnnnnnnnnnnnnnnnnnnnnnnnnnnnnnnnnnnnnnnnnnnnnnnnnnnnnnnnnnnnnnnnnnnnnnnnnnnnnnnnnnnnnnnnnnnnnnnnnnnnnnnnnnnnnnnnnnnnnnnnnnnnnnnnnnnnnnnnnnnnnnnnnnnnnnnnnnnnnnnnnnnnnnnnnnnnnnnnnnnnnnnnnnnnnnnnnnnnnnnnnnnnnnnnnnnnnnnnnnnnnnnnnnnnnnnnnnnnnnnnnnnnnnnnnnnnnnnnnnnnnnnnnnnnnnnnnnnnnnnnnnnnnnnnnnnnnnnnnnnnnnnnnnnnnnnnnnnnnnnnnnnnnnnnnnnnnnnnnnnnnnnnnnnnnnnnnnnnnnnnnnnnnnnnnnnnnnnnnnnnnnnnnnnnnnnnnnnnnnnnnnnnnnnnnnnnnnnnnnnnnnnnnnnnnnnnnnnnnnnnnnnnnnnnnnnnnnnnnnnnnnnnnnnnnnnnnnnnnnnnnnnnnnnnnnnnnnnnnnnnnnnnnnnnnnnnnnnnnnnnnnnnnnnnnnnnnnnnnnnnnnnnnnnnnnnnnnnnnnnnnnnnnnnnnnnnnnnnnnnnnnnnnnnnnnnnnnnnnnnnnnnnnnnnnnnnnnnnnnnnnnnnnnnnnnnnnnnnnnnnnnnnnnnnnnnnnnnnnnnnnnnnnnnnnnnnnnnnnnnnnnnnnnnnnnnnnnnnnnnnnnnnnnnnnnnnnnnnnnnnnnnnnnnnnnnnnnnnnnnnnnnnnnnnnnnnnnnnnnnnnnnnnnnnnnnnnnnnnnnnnnnnnnnnnnnnnnnnnnnnnnnnnnnnnnnnnnnnnnnnnnnnnnnnnnnnnnnnnnnnnnnnnnnnnnnnnnnnnnnnnnnnnnnnnnnnnnnnnnnnnnnnnnnnnnnnnnnnnnnnnnnnnnnnnnnnnnnnnnnnnnnnnnnnnnnnnnnnnnnnnnnnnnnnnnnnnnnnnnnnnnnnnnnnnnnnnnnnnnnnnnnnnnnnnnnnnnnnnnnnnnnnnnnnnnnnnnnnnnnnnnnnnnnnnnnnnnnnnnnnnnnnnnnnnnnnnnnnnnnnnnnnnnnnnnnnnnnnnnnnnnnnnnnnnnnnnnnnnnnnnnnnnnnnnnnnnnnnnnnnnnnnnnnnnnnnnnnnnnnnnnnnnnnnnnnnnnnnnnnnnnnnnnnnnnnnnnnnnnnnnnnnnnnnnnnnnnnnnnnnnnnnnnnnnnnnnnnnnnnnnnnnnnnnnnnnnnnnnnnnnnnnnnnnnnnnnnnnnnnnnnnnnnnnnnnnnnnnnnnnnnnnnnnnnnnnnnnnnnnnnnnnnnnnnnnnnnnnnnnnnnnnnnnnnnnnnnnnnnnnnnnnnnnnnnnnnnnnnnnnnnnnnnnnnnnnnnnnnnnnnnnnnnnnnnnnnnnnnnnnnnnnnnnnnnnnnnnnnnnnnnnnnnnnnnnnnnnnnnnnnnnnnnnnnnnnnnnnnnnnnnnnnnnnnnnnnnnnnnnnnnnnnnnnnnnnnnnnnnnnnnnnnnnnnnnnnnnnnnnnnnnnnnnnnnnnnnnnnnnnnnnnnnnnnnnnnnnnnnnnnnnnnnnnnnnnnnnnnnnnnnnnnnnnnnnnnnnnnnnnnnnnnnnnnnnnnnnnnnnnnnnnnnnnnnnnnnnnnnnnnnnnnnnnnnnnnnnnnnnnnnnnnnnnnnnnnnnnnnnnnnnnnnnnnnnnnnnnnnnnnnnnnnnnnnnnnnnnnnnnnnnnnnnnnnnnnnnnnnnnnnnnnnnnnnnnnnnnnnnnnnnnnnnnnnnnnnnnnnnnnnnnnnnnnnnnnnnnnnnnnnnnnnnnnnnnnnnnnnnnnnnnnnnnnnnnnnnnnnnnnnnnnnnnnnnnnnnnnnnnnnnnnnnnnnnnnnnnnnnnnnnnnnnnnnnnnnnnnnnnnnnnnnnnnnnnnnnnnnnnnnnnnnnnnnnnnnnnnnnnnnnnnnnnnnnnnnnnnnnnnnnnnnnnnnnnnnnnnnnnnnnnnnnnnnnnnnnnnnnnnnnnnnnnnnnnnnnnnnnnnnnnnnnnnnnnnnnnnnnnnnnnnnnnnnnnnnnnnnnnnnnnnnnnnnnnnnnnnnnnnnnnnnnnnnnnnnnnnnnnnnnnnnnnnnnnnnnnnnnnnnnnnnnnnnnnnnnnnnnnnnnnnnnnnnnnnnnnnnnnnnnnnnnnnnnnnnnnnnnnnnnnnnnnnnnnnnnnnnnnnnnnnnnnnnnnnnnnnnnnnnnnnnnnnnnnnnnnnnnnnnnnnnnnnnnnnnnnnnnnnnnnnnnnnnnnnnnnnnnnnnnnnnnnnnnnnnnnnnnnnnnnnnnnnnnnnnnnnnnnnnnnnnnnnnnnnnnnnnnnnnnnnnnnnnnnnnnnnnnnnnnnnnnnnnnnnnnnnnnnnnnnnnnnnnnnnnnnnnnnnnnnnnnnnnnnnnnnnnnnnnnnnnnnnnnnnnnnnnnnnnnnnnnnnnnnnnnnnnnnnnnnnnnnnnnnnnnnnnnnnnnnnnnnnnnnnnnnnnnnnnnnnnnnnnnnnnnnnnnnnnnnnnnnnnnnnnnnnnnnnnnnnnnnnnnnnnnnnnnnnnnnnnnnnnnnnnnnnnnnnnnnnnnnnnnnnnnnnnnnnnnnnnnnnnnnnnnnnnnnnnnnnnnnnnnnnnnnnnnnnnnnnnnnnnnnnnnnnnnnnnnnnnnnnnnnnnnnnnnnnnnnnnnnnnnnnnnnnnnnnnnnnnnnnnnnnnnnnnnnnnnnnnnnnnnnnnnnnnnnnnnnnnnnnnnnnnnnnnnnnnnnnnnnnnnnnnnnnnnnnnnnnnnnnnnnnnnnnnnnnnnnnnnnnnnnnnnnnnnnnnnnnnnnnnnnnnnnnnnnnnnnnnnnnnnnnnnnnnnnnnnnnnnnnnnnnnnnnnnnnnnnnnnnnnnnnnnnnnnnnnnnnnnnnnnnnnnnnnnnnnnnnnnnnnnnnnnnnnnnnnnnnnnnnnnnnnnnnnnnnnnnnnnnnnnnnnnnnnnnnnnnnnnnnnnnnnnnnnnnnnnnnnnnnnnnnnnnnnnnnnnnnnnnnnnnnnnnnnnnnnnnnnnnnnnnnnnnnnnnnnnnnnnnnnnnnnnnnnnnnnnnnnnnnnnnnnnnnnnnnnnnnnnnnnnnnnnnncgggcacctgtcctccgggtccggaaggtggccggctgtccccggcccacacagggtgctgcctcagcccctctgtgcttctgcctgttccagaggctgtcaggttctctggcgcaccctctcacctgttcagactaatttcctaagttcggcgggtcccggaccaagatggcgaccgctgctgctgtggcttaggccgcctccccagctgggcgggcacctgtcctctggtccggaaggtggccggctgtccccggcccacacagggtgctgcctcagcgcctctgtgcttctgcctgttccagaagctgtcaggttctctggcgcaccctctcacctgttcagactaatttcctaagttcggcgggtcccggaccaagatggcgaccgctgctgctgtggcttaggccgcctccccagccgggcgggcacctgtcctccggtccggaaggtggctggctgtcaatatagattattctaagaggaaaagtacgttactaagttttaactacgctgttgttggtaagtaggcatagtgctgtgtggctgtaatctcagtactctgtagctcgaggcaggaagatcagaagttcagggccattcctgtttgaggccagcatgcatgacatgagatctcgtctcaaaaagaaagcaagaaagactattgggatgatacttgcacagtttatcaattcataacaggcgctggggagagggtgccgtggataagagaatttgctgcttttacaggaaccagagcttggttcccagcactcaagatagacagcttaccatggcagcagatggcccttagccatccgactctaggggatctgatacggaatctccttaggagagcacctgtacccaggtacataccccacccattattgagaatacaattaggtatggaaagatggcccagagcataaaagcacttttgctcttacagagagccccacgtttggttcctaacaccaactccagttccagaggaattcactcctgagggtaccagaaatgcatgtggtatgcacatgtcctctcctgcatgcactcacatgcatacactctcaagcaaacacttctacacataaaataaatctgagaagagatttataacagtgtggtggtgcacacctttaatcccagcacttgggaggcagaggcaggcggatttctgagtttgaggccagcctggtctacagagtgagttccaggacagccagggctatacagagaaaccctgtctcgaaaaaaaaaagaaaaagaaaatggatttatttacgtttggccatactgtggagaaaagggttcctactttctctctgccttttctgtatcagtattataattttatagaaaggatgaaacaatagccgggaagtgtaggggtgtacagtgtaggcagaactatgcaaagtctctgtcaggaagtcatagtcatctccagctgtcaccaggattttagtctttcctgcctccaatgtgacagtcctagggaaattctaattctctgggacccattgttttaatcatcttaaagccacagagagacacaagaccatcttatttgctgcccatgcagttacaaaatcagacataaattcagcactgcagcaatattcacagcattctaagcagagtcaatatatgctacatttcattatgcccaagtcaaagtaaagagattatgcatggatacatgtgcatgtacatttatacaacgatgagtaataaatatatattcacatttgttattaaaagtaaaggtggccttgggcagaaaccaccagtgtcagtaagaaccaacctagatatcaagtgggaaggaatactagatgagagtttttctgttttatttttaataaattttaattctgtgacaatttcacacatttatatgttttgatcatttttatccctccattcttctgttgtatcctctcactcccctgaaatccttcttttccaacatgtccttcctactttcatgtcactgcccctcaatagcctattgagttcaatagttactttggcaatttccaagtggctacatcttggaagaaaaattcctttccttcctgagccccattaactaccaggagcccttcagccagaggtgaggcctcacatgctgcgctaccgttagtgcttgactgtcagtggctgactgtgcaggtgaccacagttctgtgagtccatggatgcaggagcaatgccacattcaaaacagtgtttcacaccattcctcccatcctcaggcctttacattctgagagagtttctcttggggactgtgataaggagtcctgtcaatttgaatatgcacattttgggtgaaaccgtaagataatatcaaattataggcttagttattgctctcaacagaagcaagacaatttatatttttagcaggacaagactcgaccgtggtttgggatccttagaatttagcactcctgggccaatttaactctctgctatcacactgaattgtactgaagacttccagagttattaaagttgggattataaacaagacatggtagtcagtgcctgcaatcccaggatgggaggcagaggcaggagttcaaagctaatctccaccatgcagccaaataacagggtttcacactgatacagctcagtggtagagtattggcctggcatgcacatgtccttcatttcatccctaccatcgcagtaagtgaaatcaatctaggaagaaaagtggggagtatttgagatgcagctgaagagtatagtaaagactgcctcagaataaaccagtggatgaacataaacaacagtcctaaagcctcactaaacaatttacaaataaaagcaaaaccatcatgagacataaacacaagagtggaagttacacatagaagatgagaaaaaagaatttgggtgctggcacagctccactgagtagaaaggtgaagttcttaggtccttcaggctctagcagttctctgtggtgctgctgtgtgcttgtgagggggagtgagcgagtgagcgagtgggcgagtgggcaagagccttggtctctgcatcctccatgttcttggcctggggttgctgcagagtgaggttgtacgttcttggcagttcctggcacctgtgctccactgtgctgtgcttcaggtgctgcaggttgggtgtatcgaggaccagtgctggccttgcagctcctgctgctttctcagggatggaggtggtggggactcaactggagcaacccatgttgagaatcagtttcacatcctctgggctacttaaccatcatctctccaaccctctcgtgttcttgagaagaacacattgttgaagattttaagcaacaattctgttgaatgtactgagatttcttcctagtctagtaatactctacataattaagtcaataatctgagaatatctaaattaaaataactatcacaactgaggaaagccaagtaattgtttttgtttattggcacaatggctcatgatatatatacatatatcccaggatctttgtggtggctaacagccatctgtaattccaattctaggggatccagtgctctgttctggctttcatgggcagtgcacacacatgtggttaaaataccaataaacataaaaataaatttttaaaaatctcaaatttttgtaaatgctaagaaaggtctttgccatagaaaatgatattttacattgcatattattttcatcttcggcctaactttgtcttgagttgtttatactgtaccccaaacctattaacattttgagctctatgtgaaagcaaagaagtgattctaatatcctggcacttataaattaatgaggttattttaaaaggttgtggtaatatgtttgttcaaaaaatagataatggtttctaaaataagtgattaaataggtaagtaaccaatagacaatgagaattatattcaacctattttgctaagtgtcacgtttgctgttatagaaatgatcataatttgaatgagaaatttgaagataatttagtgcataaatcagctattaataatgatatttcagccaggcgtagtggcacatgcctttagtcccagcactcaggaggcagaggcaggcagttttcagagtttgaggacagcctggtctacagagtgagttccaggacagccagggctacacagagaaaccctgtctcgaaaaaaaaaaaaccaaaaaaaaaaaaaaaaaaagatatttcagcaaatcatgtaatctggatttttgaattatgctaaaggagttttttgtttgtttaaatatgctctctgtgtgtgtcagcttgacacaccagcgaggagggaatctcaaatggtaattatctcagtcagactggcctgtgagtatccctatgtgacattttcttaattgctaattgatgtaggccattgtgggcctgggctgtgtaagaaaggtagctgagcaagccagggggggaaagccagtaaggagctttccttcattgttcctatctgtgctcctgtttgagttcctgccctgacttccctcagtgatgggttgtgattgagaatataagccaaattaaacctttccatctcaagttgcttttggtgtttgtcatagcagtaaaactggaacatgtgttatctttataccattctcttttatttgttagaaattcttgactgttgtactggctagttttgtgtcaacttgacacaggctggagttatcacagagaaaggagcttcagttgaggaaatgccttcatgagatccaactgtaaggcattttctcaattagtgatcaagggggaaaggcgccttgtgggtgggaccatctctgggctggtagtcttggttctataagagagcaggctaagcaaaccagaggaggcaagccagtaaagaacatccctccatggcctctgcatcagctcctgcttcctgacctgcttgagttctagtcctgacatcctttggtgatgaacagcaatgtggacgtgtaagctgaataaaccctttcctcccaacttgcttcttggtcatgatgttttgtccaggaatagaaaccctgactaagataactgttaaaaagaaaaccttgaatatatagagagtggtaatttggatttatattgctacattattacacgtatcttataattcagtatgagtttttaatgtatataacagtattaattttgactaaattcctgttatttagggaattatgcaggccgaggaactactggaatggttgctcgatttataccttctcatcttagtaacaaatcatgcagagtgacatcactgtgttacagtgaagatggtcaagagattcttgtcagttattcttcagactacatctatctttttgaccccaaagatgatactgcacgagaacttaaaactccttctgcagaggagaggcgagaagaggtaagtttactcaaaactatattctttcttcttagtaagaggcctgcaattcccaagggaaggctggatagatgatcagtttaagatggtcacgctaagtttgaggtcctgagctacatatgatgctgtctcaaaaataaaatagaaatggaaagttaattgttcaaataaataagtaaatgcattgatttccaaaaaatttatgatttagggaacatataacaaaataggataataaactggactgtaggaatgaaatgagctaagtttaaaaagaagtaagaaaactgttaactttgtagatgcttggagaaaagtcagttagacagtaggaaatgtgatgatagatgtctaaaagactcggtgtgctgttataccaagtgccaccccttaccgttcagtgtacataggtaggcagcagttcattctctcccacttgtatctctttttcacacagtattagcacgtgacaatagccataagtacattctataaaatatatatgtgaaagtgggggaagtttaagaaggtatttatataaaagtagatgtaagaattgaattacagtgaacaaaatataaaagcgggaaggtagaaatagtgcgttttagacagtgtacagctatgggaacatgtttggtttagcttgttatggttttcctaacatgccagccatgctgacctttaaaactgcttacagatatacttttaatttaaaaagttattattgtgtatgtatagttgttttgcttgtatgtatgtctgtgcatcatgtgcatgcttattgtatgccagaggccggaaaagcatgtctcatcccctgcaggcctcaccctcagatctgcctccgtgtgcctctcctgagtacttacattaaaggcatgcgcccccactgcccagcagatgaattaattatttttttcccattttttattaggtatttagctcatttacatttccaatgctataccaaaagtcccccatacccacccacccccactcccctacccacccactccccctttttggccctggcgttcccctgtactggggtatataaagtttgcttgtccaatgggcctctctttccagtgatggccgactaggccatcttttgatacatatgcagctagagtcaagagctccagggtactggttagttcataatgttgttctacctatagggttgcagatccctttagctccttgggtactttctcttgctcctccattgggagccctgtgatccatccattagctgactgtgagcatccacttctgtgtttgctaggccccggcatagtctcacaagagacagctacatctgggtcctttcgataaaatcttgctagtgtatgcaatggtgtcagcgtttggatgctgattatggggtggatccctggatatggcagtctctacatggtccatcctttcatctcagctccaaactttgtctctgtaactccttccatgggtgttttgttcccacttctaaggaggggcatagtgtccacacttcagtcttcatttttcttgagtttcatgtgtttaggaaattgtatcttatattttggttatcctaggttttgggctaatatccacttatcagtgagtacatattgtgtgagttcctttgtgaatgtgttacctcactcaggatgatgccctccaggtccatccatttggctaggaatttcataaattcattctttttaatagctgagtagtactccattgtgtagatgtaccacattttctgtatccattcctctgttgaggggcatctgggttctttccagcttctggctattataaataaggctgctatgaacatagtggagcatgtgtccttcttacaagggtactctacccaactcattttatgaagccactattactctgatacctaaaccacagaaagatccaacaaagatagagaacttcagaccaatttctcttatgaatatcgatgcaaaaatcctcaataaaattctcgctaaccgaatccaagagcacattaaagcaatcatccatcctgaccaagtaggttttattccagggatgcagggatggtttaatatacgaaaatccatcaatgtaatccattatataaacaaactcaaagacaaaaaacacatgatcatctcgttagatgcagaaaaagcatttgacaagatccaacacccattcatgataaaagtcttggaaagatcaggaattcaaggcccatacctaaacgtgataaaagcaatctacagcaaaccagtagccaacatcaaagtaaatggagagaagctggaagcaatcccactaaaatcagggactagacaaggctgcccactttctccctaccttttcaacatagtacttgaagtattagccagagcaattcgacaacaaaaggagatcaaggggatacaaattggaaaagaggaagtcaaaatatcactttttgcagatgatatgatagtatatataagtgaccctaaaaattctaccagagaactcctaaacctgataaacagcttcggtgaagtagctggatataaaattaactcaaacaagtcaatggcctttctctacacaaagaattaattattaatactggtttggtactagctaaatgtctgctaatgagcttatggtgtttgattccaggtactgggctttcgacccagggtctcacatgataggcaagcactgagctatattctcaacattttgcacatttaaaggaagaacagtagcaaatgtgtaattctcatgagatttaaactaaattctggtgtgtataaactgatggcactaccactctcaggtatggttgaggggaaggttttagttgtagatatgagggaggagagttcagccagaggtatctggaaaaatcctgagcagagagagtactggagtgaaaggagagagcgggtagggaaagtgagaggtgaagactaagagaggaagataacagggagggagcatagccaaagtagctgggttataaggagaaatgagaagctggggagcggagggaagcccatgagttagagaaatttagggcaagaaaagccaataccagcatggacttttgaaatgtataacaagttactagtgatactgagggagcctggagtctggtatgctaatagacaccaccatagccttttgtcccctctgctggccaaaaggaaatggttcctttggtagaggggaacaggctttacaagttcctaatgaatgctggcttttgtctaacctccagaatttgagcttgacaattattataaaatgagaaaaaaatcattttataggtgagttttaggatattaaatgtgacaacaagtttatataaagtaggaaaattataagcgatttatgagcttttttggactggctgaaaacgaattctgctgtgtcattttgttgctgctatataatttctctttgagatatgtaggtaagtacggttgcagtcaaactctgtgactgagagataatgaaaaatttggaagtgcgcagacattttaagtgggccagccaactttgctatcatagactccttagatgatgatgtcatcagggaaaatgctgaatcatttttatgaaaatgcttttcttagtatgctttgttgtattaaccaaattaaagacaataattttaaaatctgaattataaaaataaatgatactcatatttgaccaatagttatgtatgtgtatgaaattaaggagctatcttcttaatttccataatttttcatttgacagtttgttaaaattttgacagtaataatttagatcagctattcttaatccagaaattatttattaggcaccttctatacacttttttctatgttaaacttaagaaaatgatgatataaagatatggccccttcatttaagccagcaagctccaggcatcctcctgtctttgactcccttcctcagtgctgggcttataggtgtgccttactatacccaacttcttatatagattttaagaggtgctatttgacttggaagctgattgattattgagcttagtaattacctctaatttgtttatatgttgtgtatatgtatatatgtatgtatgcatctgtatacatgccatggtacacatacagagatcagaggacaacttttaagagttgattctttctgccctatgttgattcctagaatgaatgtcattagatttggcagcaaaaacatttatttaccttatttacccacagcctgtctctcaccggcctccactaatgaccatttaccatgatcattcaataccatgaatttggcaagtgtttattctttgttgtacaagttagtttttgtcaacttgatacaaacctagatatacctgggaagagagaatctcaattacagaattgcctccattagtttgtcctgtgggcatgtctatggaggcattttcttgattaatgactgatgtgtgaaggcccaacccgctgtgggcactgccactcttgggcaggtgctcttgggttgtataaggaagcagactgaccatggagaccaaagcagcaagtcacaatcctctgtgcactctcttttggttcctgcttgagctcttgccctgacttcccttcatgattgacgataagctgcgaggtgaagtaaccctttactctccaagttgctttggtcatgtttatcacagcagtagaaagcaaactagaacatttggtgaccatggcagtgtaaagataaaaaaccaaaacacaagggaaacactgagtatgttggattgagagcaatagtggagtaaatgtacactctcttcatgcctcatagtaaagtaaagagatatgtgagctctcaggaaacaggttttctttgtatcagtaaacaaactttcagcatattgtgagaagaaatggatagaggaagagcagagtggtgtttgagggttgaagaaaggcagtaggaagcacaagggaacactgggctcggagcgcggctgacagactgggaatgactaggagttaggaagctgcaaggaggagtgaattcatagaatctaggtgagaaaattcgtgttttattttattttattaagccatactttgtatattgtagaacaaattttggggaaaaatcacctttcaagtgggtcagtaagactagtcacatctaattgttattgctctagtggtgaatgggattaaaaagaaaactgttcacaatcactgccaaataaatgacacatgttggattatttggggatataaaaatacatgggaagttgaattcatgttattacaaaaattagaaagtaattaggttcatatctgcttgcatcgctaatgcatccttctgcttacactccaccttcgtcaccaaatataaccctttcttgttctcctttctacatttttgaactttagctacattttcatgtgtgtatacaaatttacaaatacacacacatatctctattgtaggctaggttcacatatgcggcgtaacatgcaggtttttcttagtttgtgttccttgcttgatcttacactttcctgtcccatcttttcccctcagatgccatgatttcacttttctttacagatgaactgtatctcactgcgtctatgtatcacatgtgcaatgtgcattttctgttcatttgagtagagcagcagtaaccatgggtgagcaagctatctctgtggaaggccatgaagaccttttgtctgtctgtctgtctgtctccctttctcttgtctctctctctctctctctctctttctctctctttctctctctcacacacacacacacgcacactcactcactcacacttacacacatatatatgtgccaggaattgtatagctgggtcgtatggtaattctggttttttgttttgttttaagtaggagaaaaagttacttggtaagaacagtggcagaaaatggagaaagtttgaagcaatggtgaatgggtggaatagatactggggagacctagagaattgttttagaaaggttaaaaaagggggggggctagagcgatggcttagcagttaagagcactgactcctattccaaaggtcctgagttcaaatcccagcaaccacatggtggctcacaaccatccgtaatgagatctgacgccctcttctggtgtgtctgaaggcagctacagtgtatttacatataataataaataaataaatctttaaaaaaagaaagaaaggtaaaaaatgttatctttatggtgtggtaggtccaggtgattgactgtcctgctgtcagctggacagtgattagaagtcattatatgtggtttattcatttcttcttccttctctcttagtttacacccttctctcccttcctggggattaaattgaaggacatgccctaccacagaactgtatctcatctggacagccaccccaccaccaaccctcccttcctcttcctcttcctcttcctctttttctatttaattttgagacaagatgctagtaagtttcttaggctgttgttattcatagcttaaataggtaatgaatttatgatcttcctgcctcacctgggattgcagactggcactagtaaacctagctttcgtgtatacagtttccaattgtatttgtatttgtgattttccagttggaaatagcaagtatggactgtagctccagtgctcatcatcacaagcacggtggaagactgagacagcattgagcaatgtttcatgtaacattccatctaacatctcatttctgtacttaaagacaatttggggatggaaatgctccattaaagtatgctgtaagaattgaggactagagattaattcagtggtacagtatttaccttggatgcacagggattcaaaccctatcaccagaataaaaactgaaagcaaacccattcttcttcttttttaaattttgaaatggcaacttttttttctattttaaaattttttattagatattttcttcatttatatttcaaatgttattcagaaagtcccctataccctccctccgccctgctccccaacccacccactcctccttcctggctctggcattcccctgtactggggcatatgatcttcacaagaccaagggcctctcctctacatatgcaactagagacacagttctgtggggtactggttagttcatattgttgttcctcctatagggttgcagaccccttcagctccttgggtactttctctaactccttctttaggcgccctgtgttccatccaatagatgactgtgagcatccacttctgtgtttgccaggcactggcatagctatatcagggtcctgtcagcaaaatcttgctggcgtatgcaatagtgtctgccaaacccattcttcttgagactcacatagaatctgcttatgattgattacatttcagttacgacagcctccagttaagcgcttgagacttcgtggtgattggtcagatactggtcccagagcacggccagaaagtgaacgagaacgagatggtaactatattttggccagatttttgtgacatgtggtatttaaagatttatttatcttgtctgtataagtgcttttggctgcatgtatactatgttgtgcctcgtgctgtggtggaggtcagaagggaggcatcagatcttctggcactggagtcatagatggttgtgagccaccttgtggatgctgggaactcaacctgagtacttctgaagagcactaagtgctcttaacctctgagtcatttctctaccccttatctccattattttcaattgtaaatgatgctacaatgaaatcttaataagaataatttggtaaatttgtgctagtacatcataggataaattcctagaagtggaatggctgagtcactagatatgtatatttaacctttatatacatagatacatatacatatacataagcatgtacatacatacatgtagatatatataactttaaaacaattcatctgaatatatttcatttaataaatctataaccaaaattgtgttcaaactattattagaccttttataaaacagtattcctaagtatattatccttggttcacttttataaaatataaagttacaatatgtaaaggtggcttccatacctgtaatcccaggcctttgaaggctgaggcagaaagattattggaaattcaaggactacatagtaatttccagaccagcctgggctatagaatgaagagactctgtcttcaaaaaacagaccaaatgaaagaattatataattattacatttttaatctaacctcatactttttgtttgttttgacttttgaacctatgtcttgctctgtacccctgacagttctccttgctatttagtcacactggcttccaggacgcttgtgacactaatcataactcccaagtctccctgctttaagccacatgagtgttgtttttatacttccatttaaaatgcccttgatatcctcagcacttaagacataaaatgttcttaatatttcccacggtgtaacaaaatcaaatgcccttaaagaggaaaagcaaacaaatatatttgtttgaactaagaaaacatgtaacactgaaaagacaaaatacattttccgtcagctagttgcaactatctgaggccatacagccctgaatgacttaatctcatcaaatacctggaactttacagtaacaagaattgttttagggaaattaaagacccaaggttattttatgtctgtgtttgataatgtagtgagagagcaagcctttccttcaatttattccacttggagttcataagctcctcccagagcacatttctaagtgtaaatagacaagtgatggagcaagagtgggagatataaagttacctaggaacaggcatagatggagaggagacccatgggtacttactcatgtaattattataaaatgtgatgggactctgataactttttatctgttcatgtaaaattacttaggcaatttaatttttaatttctagaattttagatttctaggccttcagatctacagatctaggtttttgtattatttaaagatcctgactttttgctaaacttactgataaaatttatgttgtaataggagagcaaagtcccaatgtgtcactgatgcagagaatgtctgatatgttatcaaggtggtttgaagaagcaagtgaagttgcacaaagcaacagaggaagaggaagacctcggcccagaggtaatttgtcttactggttaaatcactagagagctggtaaaactgcttagggcaaaactgctttttcttttttgtttttggattttgtgtggctggtccgcgtgttattttattttactttatttatttgcatctcaagacaaggtttctctgtgtagctcggctgtcctagaacatgtactatagacgaggctggccttgaactcagatcttctgcctttgcctcctgagtcctgagattaaagttgtgcatcactacacccagctggtagatagtttttgttgatattatctaactgataaccgaactgcattttgtaaccaatgtagtcataactctcttctgattccactagacccaaaatttcaaaatacacaaaacaaaagatttttaattttaagtccctttccaatcaatacactttgaaaattggaagtctgcaaagctttaaagataagtgtatgtatataattagaaaaagtaattatttaaaatttttcatctatctctttgatgtgtgtatatgtgtgagtatgcatgtgggggtcagaaaacaacttggtatatatgtgtgagtgtgtatgtggaggtcagtttccaaactcagtccggcttgtcagcaagtttccttacctgcttaaccatcattctggcccaagattgattattttcacaagaatatgtcatttattcttatccctgttgattagactgtttgattaagtggaccaaaccaccagtggccataactgatacactgagtgtgttagttagggcttctagtgctgtgataaccaaaagcaatcaggggaggaaagggtttattcggcttactctttagtatcactgttcatccttgaaggaagacaggacaggaactcaaacagagcaggaacctggaggcaggagctgatgcagtggctacagaggagtgctgcttactagcttgcccttcttagcttgctcggcctgttttcttaaaataccaggaccagtggcccagggatgacaccaccaacaatgggctggaccctctccatcaatcactagtgaagaaaacgccttgtagctagctcgtatggaagcatgttctcaacggaagctccctttttgtcagcctctagcttgtgtcaagttgacatagactgactagaacactgaaattttatgttgctgtgtgttttcagaatatttctgtagaggtttgttttgtgtttattttttgcatttgaaatttgagtttgaggctggagaagatggatcaagagcaattaagagttggtaagaacactcactgctcttgaaggtgagctgagttcagttcccagaatccacatggctgttcacaactgtcagaaactccagttatggagatcccgaatcctcttctgccctctgcaggcacctaggttcatgtcaccagatcactcacatgtaatttaaaatgaatagatcttttagaaacttgggtttgctttaacatgtgcttttttgaaggtggaacaaatcagccagatgtttcaactcttcctacggttccatcaagtcctaatttggaagtgtgtgaaactgcaatggatgtagacatgccagctgcacttcttcagccttctacatcctctacagatccagttcaggctcaggcagccacagccgccatagaaagccctcgttccagctcgttgctgtcttgcccagacagtgaaccgaggcagtctgttgaggcgtctggacaccatgcacatcatcagtcaggtgaggatgctattcttcaagttcatgtgctgatctctgaacaccgaggaacacctagtctgttctgaaagattgtaaatcacagtaacttcttgctggaataagtaaccaaaatcatttttaatatacaagcaaacttaaacacaaaattcaagcgtgtctagttttcatgaatttttacaaatagtgaatctttaatttatataaggtaattttatttaaggtaatagcaggtagtattttgacatagtgtaatacactgaaagattattttacaaaccattattaaccaaaatactgttctagatctctattaaaatgacaagaaaatatatttcattattattatttccattgtatttatattttcaatttttcttcaaattattaagtactttgagtatattgaaaatagtgaacctgcagtggtcccttctcaaaaatgtagtatactttgccagaagaattattttcctactatatttatgaaaaagaattatcttactaattctttatctttatagtacttgatgttagtcaaaaatatcagttcataaaatctgttaacacatttttctctcagtacagtaacttctcatgtttttcccaccccaactatggaatatactatttacaataatttcagtaaatatatagtctacttgaaattttaactgtgtacttttaaatatagtaaaaatcatttgtctattatttttaaattcttctaaggaggcattttacttaatacagaacaaaaatagtatcaaggaatatagttagtattaatgctggtacctaaagtaagacctctgacagtttcctaacagcttcacctccaagttgtcaccgatgctagatcccagataatggggtatttgaattaagtagtttgatcattatctttcatttttgataattaatattcactttctatgggaataatagagttagctgcataactgttaacactgtgtatagtttatcaaaacagtaagctaaagccgaattagaaagccatctctttcacatttcacatggcatttcagcttgagggaaaataaaatacttggaatgctttgagaaacagggtcaaaggagttgaaagtagacccaaactagtgaaattagtaaagataagaaaaactttaaaatacttacttttgttttctgtgtctatattgcctgcccatgcacatttgcactttgtgcctgaggaggccagaagagaacatcagcctccttggcctggagttagcccagttttgagcccccacgcagctgctaggaactgaatccaggtcctctgtaaggttcaagatcgggattttttaaaagtgctagtgttattgcaaatattctgaaagtctgtaagcaattctaagttattgagaaaacttagctaaaaagactctgtagactagttgtaagttgtattgaatcttaactagttccaattgtttcttaaatacatttgtgagttaaatattcttggagccttttaagaaatgttttttcttagctgtgctgtgcatttttataccaggtttaagctgctgaacgccttttaggtctgatagactaagcgctgaagaatgcttttgtgacggccaaatgatcattgtttgaatattatttggtacctttgtccataaaaattttaaagaaagggattgtttttgaattagtagattgagaatgttgcttaacttttacacactatggtagaatattttcccgggtctaaaagagtaccagttctgaggagaatgatttggtgtgagctatagattacacttacagctgtttcggcagtaacccttccatcatcctacagcctgacatctcatctggaaggacgaaatgtttttgttttcttttctgatcattctgtgcttaccaaagcccatccaagtctagacggcttaatagaccctgggaattgtccattgtgagactgtggtaggtgggaatgtcagtctagagctgtggtgtctgtcagcacgtcgtgtaaagctggacatgtggatatgactgttctctgtgctcagcctgctgcggatacctcttcatgtgcgcgtttacaccttcctttgtcattgtgagtacttggccacaggcagtgagactgaaaacttgctgcagtgtttcagggtccgtagtctacacctgaatcctctggcgatgatggtgaacgtcgcaccacaaatctcagtgaacacttcagagcactcttcctctcagcgcctttgcgtgtttattttgccctttcctggcttttaaagtactctggcttgcccttctcccctccataagctgcaagcttcatcgcagtgaagagcggaaacactcattttctggaccacttcaacttcctaatgcgcacatgtaggttgcctggaagaaatgtaactcctcctcttacacctggccagatcagtttgaagcctgcctttccagcttcccagggaaagactcctggtcccctgcctccccagagtcacttcttttcctgtgccattattgccttttctgctgaatttttccttctagtcacaaacatactgttatctgaaagaaagcctttctcaaccatcctacattcctccaaataaggctctgcttcttcacttcctcatttctcttcagccccgtttcacaccctccccatttattcatggaccaactcaaagctgcttttcggcctccttttcctgtagaaattttggcagtcaccagtgagctgcatcgtgccaatcatgagaacatttctgtcggtgccttcatagagctttgattcggttgcatttaacagtctttcccttcttgcctttcttgatatttacaccacacatgctgtttgctcttattctccatcatggctcagcttctaataaacgtcgttagtttttctttttctgtctactttgattgagtactgtggttgaacctctcaggatgactctcttgtcttttctacataaactctatccatctgcgatttcctctactgtatgattcccaaaggtgcatttaagtcttgtcttacagccccaagtttcagattattttgtctaattattacttgggactgttttggatgttttcagtgattttaaatttaataatatgtccaaaataaaagtattgcagcctcctgtccttcccatccccttaatggtccaactgagtccttttcttttaaactcttttaaaaaaaattacgtttgtgctgtggtgtgtttgtgtgtacatgtgtgtgtgtgtgcatgccaagtttatggcggaaaatgtctttacttgctgagccatctcaccagcccttagcagtccttttatgctttaattttaatttgcttattttaataactcatgagtaattttgaattcttcgatttctttgtatcctattcagttcatcagcaaatcttattgccactgtatctgaactatattccacctctttccatctcagtgccattccttacttctcagttgctgtccttgcatctgctcttgtactttataattccgtctccataaagagaccacaacaagcatttagagtctccaacttggctagttataccactctttgaaagctaattgtatttagaaagggagccacagaagaaaacacttccatctccatactgtacacctcagtacctgcacagcctggcgctcgcagttctagggttttgttttgttttgttttcttactgtctttttattaggaagatattctttagcctaagtatttcctgagggtggtcccgtaattattatgaagtcctctttcttttccactttccctaaaaaagttacatttgaaaaaaaataaaaccttcttgtttatttcactaatgtatctgttaacctttgtggtggtgttcatgtttattaatgtgtttgttacttagttttactagcctgagctctcactaagattgagcattcattgcctcttgtgtctgcaataagaatgtctttttctccccctccaccaatagtctctaaagctgtagcatgcatattaagaaacatcacattgtttttaagatggtatatgtttagtctttagaattttaggcccatttcattaactgttttgtggagaaggagatccctaagctctgaattgaatcctccgtcctgagtgtctggagctctggaatcacctgtgtagcacactgtacctgaccattagcatatggccattactatatgtttggtaagctactctcctttggggggagtgttttgtgatagcatctcgtgtctgggttagctttgaactctggattctcctgcctctgctgccaagtgctgaaatgatagccatgcaccacaacccaacaagctctacagttaacaacatgtaggagatgtgctgtgttagatttccagtggtatcatttagggtccatgtttgctgttcaattatataggtaattttttgccttgttataaaaatatctaaaatcttgttgttgtaaataagtttacaagtgaataaagtgagtaaaccaggacagctagaatcctggcaggataaagatcaaatggaggcaccagtggaggagagatgcgagattctggagcagcagtgtctctggagcacactggcatgtgctgtggggtttgaagcagagttagaagaatagctacgagtctagtggaattttacattactggtggacttttcctcttattgttgcttcttcatcctcgtattcttgaattttattttagtagctacatcatactacttgaagtcacttcctatatttgtagctcagacattgtgattctatacatatttttctgtggctcattcatcaagactttttttaaaaaatacatttataaaattacattttttaaaaataagaacaatgtgactttgtgccaaattaaataaaatatgctatgagtttacactttaaagtatttcagtgtaagtacagaacattacagtctctcagtgatgcttgagcatctctttaccaaggtggccttgctgtgcttcctaggctagacttggctactgtttcatttgctgcatcatttgtaaatattttctgtgttagaaagcttagggcgagagagtattgatagtttattttcctcctttgaatttacttagaacccatttaaaactgtgattagagaatacggtaactttggattaaatggtgacttcagtgcgtgcaaaatttagtttggagcagagactcactgagactggagtcacttccaggaactttaagtttctaattaaatagatcgctcagactgcaacaatccattaccagaagatatgtagctagtaaggcctgtagtggattcttataaataattgcttaaattcacaatttcatactatgtatcatcattacactaaatttagctctgtagaaacattactcgtgaattaaatacagagtcatacaatatagtaaagcaaagttttcaaagcctaaataatagctatatgatagttccttaaaataggatcatgtcacacccaagataggaaacaagtgagaactggaagaaaaattgagagcaaactgttacagttcaaccgaattagataggagcataatccatcgttcagaaggccctgtgccttcccaaggtgtggagtgaagcagtaaccaagtggtccattcttggttcatctctaggtggtttaatttttctcctatcttaatgacattaagcctattagggagaataggcaggaacctttgagaagaaaatgagaagttagtagttttagttatatgtagtagtagttttgtatatgagatagtagttcttagtgttttgttgagtgtttggttttaaacagttaaaccaaaataattattatattacccttcagtttggatttatgctaaaaattaatcccaaaacatttatatacatttataaattatacatagttacatgtttttaagaggatatgtgagtctctatatctgctgtagtattccaagctggtaagtggaactgtttgtttaatctgcaatgtctattgagaatttttaattcagtacttgcttagccttgggatgattttttttctccttgtaaattaatatgcaatcatatttcttggtgataaaaacattattatattgactaaaatatggaatgtggaacactttttaaaagccattgtataaaatatttgtccatgcatggtatcctccttggtattggtagatttttctaggaagaagtaacattagaaggctatcagtgatactagaattattccctatcttttttttttcttttattggaaataggggttttgtttgtttgtttttcatacaatatatcctgattttagtttcttctcagtctacttcttctagttcttccctgccaaccctctcatccagatgcaccccctttctgttagaaaacaaacaggcatctatgggataataacaaaatataataagataaatcaaaagcaagcaaattggaatagtgcaaaaccaacaaaccaaaggaaaagaacccaagaaaaggcataggaaacagatagagatacaaggaccacttgcttgcacactaaggaatctcttaaaatgcaaaattgggggctggcaagatggctcagcggttaagcgcactgactgctcttccaaaggtcctgagttcaaatcccagcaaccacatggtggctcacaaccacctgtaatgagatctgacgccctcttctgggtgtatctgaagacagctgcagtgcacttatgtataataataagtaaatctttgggctggatcgagcagggactgagcgagcagaggtcctaaaagttcaattcccaacaaccacattaagactcataaccatctgtacagctacagtgtactcatatacataaaataaaaaataaataaatcttttttaaaaatgcaaacttggaaaccattatatataagcaaaggacttgtagggtgaaaaataaaaacaaacaaaaaaggttaaattaaaaaaaaaaaaaaaaaacaccagcattacgagagaatctccaaagatgcccttgacttcattttatgttggccacctacttctgggaatacagtctacacttaagaggagtttattgggggctggtgagatggctcaacgggtaaaagcaccgactgctctcatgagttcaaatcccagcaaccatatggtggctcacaaccacctgtaacaagatctgatgccctcttctggtgtgtctgaagacagccacagtgtacttacatataataaataaataaatctttaaaaacaaatgtaactggagtgcctgggtgggggcacacacctttaaaaaaaaaagagtagtttatttccccagtgagactcttggagaaaaacaaattttcatttgcaagtggttctcaattgagacagcatctgggttagggacaaggcatgtggcctacttttcattttagctctagatccacatttgatgcagacctgtgcaggcctcactgtgcatgctgcctcagtctctggagttcatgtttgccattcctgttttgtttaaaaggccttgtttctttggtgttctccaccctccctagatcttacactcgttctgcctcctcttccatagattttccctgagccctcagaggaaggatttgatgaagacatcccgtttagggatgagtgttctgaggtctcttcactctctgtatattgtctggttgtaggtttctgtatctgttcccatctacaggatgaagcttctctgatgatggctgagtgaggcattgatctatgagtatagcagaatgtcattaggagctgtttattactacattcctttagtagaactatagtattggttttaccctaggtccttgggctcttgagtctcaacttcttggtcaaccaagcaacatggctatgagttccatcttgggaagtaggccttaagtcaaatgtgacattggttggttactcctaccaactttgtaccaccattgcattagcataccatgcaggcaggacaccatcttagagcaaagtgtttttagctgggttggtgttgtttctccttcagtactattcagagtaccctctagtaccaagaacagtgtccagtgagggtaaaggttctacataagtgccagcttgacttctctgtgttcagtgagttgtgtaggtattttcagcaatagcgccttgccatcagtttgttgctctcacaacctatagtatttgcaacagcctgggttgtttctctaataactcaactacatgtagcctaatcccagcacatttgttgacaagatgtccaattgaggctctgtctcctctgttacttggcagtgttatttagattatcttcatatatgtgtgtgtgtgtgtgtaatatatatatatgtgtgtgtgtatgtatatatatatatatatatatatacatacatacatacatattaggaagcttctgctacttccatactaccactcaaatagtctttaattttagctgtctttccccacatttcctcctttcctctctccattcctgcttgatctcccacttcattcccctttatctataactgtgcattctatttacctttgcagggagatctattcgttccctctagtcccttactttatacctactctctgtggctgtattgattgtacctttcttatcattgactgaacagctagtatccacatataagaaaatgtgtacctagtatttgtctttttgtgtatgggttacctctctcaggatgagttgttcattaactcttagttagctggttgaagacaattctttatcatcagaggccatagtaataagagagtaatgacactagcatgcttgttccccaaataacaaaatttgcacaagaggctgaaatgcagtttgctgcaagtgtcactgagaggagttgtgtgtgtgtgcttctgttaccaagtctgccactgagaatatgcttccccacatacttcgcctgccctttggtgctgtgtaccctcctctcctccgtgtccttggtctgttcagtaatgcctgtcctgcactcacctgcttctttttatgtattgtcttttccttctcctcaattaagcatactcgagcagcaggaactttctcccagttaagacataccaagttccctttgacctttcttcctcaccatcccataacctcccctcttctactagtgttcagggctctgcagagtttacctttttattcgacttcatcgccccacttggtgaacctgctgcagtctggttctggctcctattagtacaccatgacagtgtactttcatcagtcttgtcgttgacttacacagtgcaaaagccagctgtcaggtctcaatgtccttttcaggagtgtatcagaaccgtcgacacactagctgtctccaccctttgtggacacactcttctcacttgacctatagcatttccgcttacttgtttggttggttggtggggttttttgtttgtttgtttgtttgttttctctcaaacactgaagttccccagggctcagttattacctgtcatcaggagccttgaagtttcatcacaagagacatccaggtttgttaggaatccttgactcttacgttcagtctctggttaatttctccactggatgggtattagttctttccagagtgaattgttctttctttattgttcttcactgtggcaaatagtaggtaaaagatgctgcctttgtctctcacatctccgatgtttcccctgagtattttccttgtcctttcctcctcctggaacagctctttaggatagccatgaaccttgagtccttgagactatggtcaaatagcaccctagaaggcttttctttttctttttctttttctttttttcttctttttatattttcttttattagatgttttctttatttacattttaaatgttatccctgatttcccctctaaaagaccactatgtctctccccctctaccccctccctctgctcaccaacccacccaatcccgcttcctggccctgacattcctctacactgtggcatagaacctttacaggacctagagcctccctcttctcccattgatgactgctacatacgcggctggagccatgagtcccaccatgtgtactctttggttggtggtttagatcctgtgagctttggggaaactggttagttcatattgcttttcctcctatgaggctgcaaacccctttagctccttgggtcctttctctagctcctccattagagaccctgtgatcagtccaatggttggctgtgagcatccaacttgtatttgttaggcattggtagagcctctcaagagacagctataacagacttctgtcagcaagcatttgttggcatcaacaaaagtgtctgggtttggtgactatatgtgatggatccctaggtggggcagtctctggatggtcataccttcagtctctactccacactttgtctctgtaactccttacatgggtaatttgttccaccttctaagaaccaaagcacccacactttgatcttcctttttcttgagcttcatgtggtccatgaattgtatcttggttatttggagcttctgggctaatatctacttatcagtgagtgtataccatgtgtgttcttttgtgattgggttatctcacacagaatgatattttctagttccatccatttgcctacgaatttcatgaattcattgttttgttgttgttgttgtttgtttgtttgtttgttgttgttgttgttgttgttgaggagacagggtttttctgtatagccctggctgtcctggaactcactctgtagaccaggctagccttgaactcagaaatctgcctgcctctgcctcccaagtgctgggattaaaggcatgcactgccactgcccagcaaattcattggttttttttttttttttnnnnnnnnnnnnnnnnnnnnnnnnnnnnnnnnnnnnnnnnnnnnnnnnnnnnnnnnnnnnnnnnnnnnnnnnnnnnnnnnnnnnnnnnnnnnnnnnnnnnnnnnnnnnnnnnnnnnnnnnnnnnnnnnnnnnnnnnnnnnnnnnnnnnnnnnnnnnnnnnnnnnnnnnnnnnnnnnnnnnnnnnnnnnnnnnnnnnnnnnnnnnnnnnnnnnnnnnnnnnnnnnnnnnnnnnnnnnnnnnnnnnnnnnnnnnnnnnnnnnnnnnnnnnnnnnnnnnnnnnnnnnnnnnnnnnnnnnnnnnnnnnnnnnnnnnnnnnnnnnnnnnnnnnnnnnnnnnnnnnnnnnnnnnnnnnnnnnnnnnnnnnnnnnnnnnnnncataccccccaatcccctacccaccccactcccccattttggccctggcgttcccctgtactgggacatataaagtttgcaagtccaaagggcctctctttccagtgatggctgactaggccatcttttgatacatatgcagctagagacaagagctcccgggtactggttagttcatattgttgttccacctatagggttgcagttccctttagctccttgggtactttctctagctcctccattgggggccgtgtgtcccatccaatagctgactgtgagcatccacttctgtgtttgctaggccccggcatagtctcacaagagacagctatatctcggtcctttcagcaaaatcttgctagtatatgcaatggtgttagtgtttggaagctgattatgggatggatccctggatatggcaatcactagatggtcaaattcattagtggagtagtactccgttgtgtaaatataccacattttctgtatcctttcttctgttgagggacatttgggttctttctagcttctggctactataaattaggctgctatgaacatggtggagtatgtgtccttattacatgttggagaatcttctaggtatatgcccaggaggggtattgctgggtcctcagcttaattgattcagaacagtataaaaagagacattattacacaattggatcctatttccaattttctaaggaaccgccagactgatttccagagtggttgtacaagcttgcaatcccaccagcaatggaggagtgttcctctctctccacatcctctccagcatctgctgtcacctgagtttttgatcttagccattctgactggtgtgaggtggaatctcagggttgtcttgatttgcatttccctgatgactgaggatgtcgaacatttcatttgctctgtagtaccgctagaggtcggggatggtgattccaccagcggttcttttattgttgagaatagttttcactatcctaggggtttttttgtttgtttgtttgtttgtttgtttgtttttattccagatgaatttgcaaattgccctttctaactctatgaagaattgatttggaattttgatggggattgcattgaacctgtagattgcttttggcaagatggccatttttactatattaatcctgccaatccatgagcatgggagatctttccatcttctgagatcttccttgatttctttcttcagagacttgaagttcttatcatacagatctttcacttgctcagttagagtcacaccaaagtcttttatattatttgtgactattgtgaagggtgttgtttccctaatttctttctcctttgtgtagaggaaggacactgttttgtttgagttaatttttatatccagcttctttgctgaagttgtttatcaggtttaggaattctcttgtggaattttggggtcacttatgtatactatcatatcatctgcaaatagtgatagtttgcttcctttccaatttatacccctttatctccttttgttgtctaattgctctggctaggacttcaagtactatattgaatagattgggagagagtgggcagtcctaacagaaacagaggaaatccaaaaaatcatcagatcctactacaaaagcctatactcaacaaaactggaaaatctggatgaaatggacaattttctagacagataccaggtaccaaagttaaatcaggatcagataaatgatctaaaccgtcccatattccctaaagaaatagaaatagtcattaattgtctcccaaccaaagaaagcccaggacaagatgggtttagtgcagagcagagttctatcagaccttcagagaagacctaattccaattctcctcaaactattccataaaatagaaacagaaggtactctacccaattcattctatgaagccacatttactctgacacctaaaccacacaaagacccaacaagaaagagaacttcagactaatttcccttatgaatattaatgcaaaaatactcaaaattctcgcaaactgtatccaagaacacatcaaaatggtcatccatcatgatcaagtaggcttcatcccagggatgcaggaatggtttaatataccgaaatccatcagcagaatccactatataaacaaactcaaagacaaaaaccacatgatcatctcattagatactgagaaagcatttgacaaaactcaacactccttcatgataaaagtcttggaaagatcaggaattcaaggcccatacctaaacatagtaaaagcaatacacagcaaaccagtagccaacaccaaactaaatggagagaagcttgaagcaatcccactaaaatcagggactagaaggcttttctaagaactgtccacaaaacagcactctttccctttcatctagcctgcaagccttctgtactagtttaatatagctggtaccctggggtacacatgtgtgcatgtatagagatatatgtgcatgtgcatgtaatgtatattcacagatgtctgttttccctcagagtaaactccataggggtaaggattattttgctcaatgttttattgtccgggaagtctcatatgtaagaggtatacagctacctctttgcataaatttgtgtaatttttgttttcacctgggtatttccaaagaaaagattaagaaaatattatataaacctttttagctaaaatatcaattctgacacaagaagaaacattttttaagggtatgacatacaactttaatttttcaaagttataatgaattctaataattgttttaaaatatataactatttacttgttttattgaatattgttacttgactgaaattagtaaagtaactgaaatttttgtttagattttttaaattaatattttataactattctgtgttatttttctgtacaaagaagaaaaatggtgactatttgaatgtttaatttagattcttaatggctaagtgtgtagtgcagtgagtgatatgtacttaggccctatatgcagttcgaagtaccataatataaaaaactataaaataaatttaaaatagtgttttgcttttatgatattttattttcatttgtttggttacttaaatatttatagaaattatgtgtctaattcgtgataattaaagagaaacatctgattgcatatgcatagactgtctcataatttaatgactttttatcagtatttctttttagtatttctctttaaagcatgtcttatttaatctttccctttttaagtgtataatcaactttatactattttttgttgtgttactgtctcctttcttttcctatctgtgtcagaatttttaagggggcctgagatagctttgctccgtaagcgcctgcagcagctgaggcttaagaaggctgagcagcagaggcagcaagagctagcacaggcccagcatcagcctcccacttccacttctgatcctcctcctcacgagggctcttcacgggaccctcgagcttcaggttattgatgtcaagtgtgcttaagcagcttctgcagttgctttctaaccctgctctgtggagccagtgttccccagccgttcaaatgagaagcttgtgtgtgcggctcttcttcccttcctggccaaggagtgttcagtacctagtgcagagggcggggctctcaggagcatttcccagagggcaaagacacagcgatcctttagtttactgcaaaactgtttggaaagaggtagatgtttatttttaaagtttttgaactactttctactaaatccactgactttcatgcctgcattgatctttttgtagaaatttcctgtgtgtgtatagacccttagcttttcctctttgttaggtgtgtactatagttaatcagtattttatatagatctagtaattcttttagccatactagcatgcactcaatcatttccttctgttatttgattttattcagtattgtttttctcatcactgctatagtcaacttctgtatatagggcagcaaaagtactttatgatctgtttcctgcacttacgctatcatattctacctatagtgacagtcagtgccactaggtatattaatactctaattctcttactatttcttgagaataatgaaaatacagcataacatagtttatcaagtggaataataagtactatacatcttactgtgtaggtattatagtagctgttaaaatgttcatcacagaaggaatgtatgcctagttctcagctaatgtatttataatacttgatatattttgatttatcatcctaaggaataatgagtttgggtattagttccttcctttgaaaactctgatttaattagttggaattaatatgtaccatttctgggtagaattagtcaacctttgctttataaatatctgttccagtaatggtaaccatagttatttgttaataattttgtggtaaaatataataaattcaagcatttgaaatattgtttaaaataagtcatagaaaataattagggcttgggacaaggcttagtggtaaaacagttacttagcatgccgaaggccctggatttaatcctccagcgccacaagaaaacaagaattgctagatataagtcatggtttccctgtaattgagggcatgatgactcaccttcaagtctttcatcagttttttgtttgtttgttttgttttttggggtttgttttgttttgtttagttttttcaagacagggtttctctgtgtagccctggctgtcctggaactcattttgtaaaccaggctggcctcgaactcagaaatctgcctgcctctgcctccggagtgctgggattaaaggtgtgcgccaccatgcccggcttcatcagttttacatagattctgatttaaactttgcaagtgggtatgggatgtatctagctgaagctgtttgattaccagggccacaggtggaaaacagccactcaaacgcaacagtgagactgttgtgatttagctcgctcttcatgccagcccataggttctcaactctgagtcaaatgtgcaccagcctactctaaaagaaggggttttctcaagatttatttgtattatttttaattatgtgtatgtgtgtgcaggtatgttcacatatgtgcaggaccttggcaggactgaggtatcagattgcccatggaactggagtttgaggtggctgtgagccacccagcatgggtggtaggaacctaacctcagcccccagcaagagcagcaagttctcttaaccactgagctctctctccagcctcccattttaggttttttggagtacatttttcttctagaagttaaaaaatataccacaagtcatttagggattataatacacctcattttcttttaggaaataaaacataacttataaaaaagtagttttgttgttagcagtattttgagacaggatctcattatgcaccctcagattgctcccaaacttgtagtctctcttcgcatctccctgagtgctagctagaattagaggcaggctatttggttttcttatttgggatttgtttgagatatgttcttgctgcctagctcaggctggccttgagtttgctgtccttattcttctgagtgctgggatgataagcatgtgctagcagtagccagcttgattagatctgggggcttgaggtggactacagcagatgtgtgtagctcagacgaacttgaggaacttgtggctcagaacttgcaaggaatcacttccactggtttgggtcttgtaaatcagactcagtcaggtttagaggtacttttttttttttttctttcttctttatctcatcattatctgggtctgagactagttgaaatcttgtcccttaccatatgactacatgagcttgggcagttcatttagctattgtctgtgactttccaagtttccagtttatttaggtatagcttaccccatgtaacagatgacataaagataggatagacaatgtgtacatatagtttttaatacttgtgagagagtaccgtcttacttatattatttaggtaatgtagcctactttggttaatggagatccacagagacaggatagataaatatatagttcttaatacttgtgagagaataccatctgatctgtagtatatcgtatctcttcagaatttctttgtatcaagaccatttcaggtagacaacattgaggattcggaatgagctattggtgcatttatcaaatgaatgccccaagtagctgccgcaaaggcattcagtttacggctgctttaaaagcccaggtctctctttccatttcaggtcccctgaagtcatgcatgggttgctggctcctgctcagagtgacaacaccctgtggaatctactggtacttgcccaaccaccacagagcccactggagcatggagccagcctagagagggtcaggtaggaactgttttttcacttatggcacggttttgccaattggaaaaaaagtaacttttataccccaaaagggtgtaaaacattgatgattatttttgaaaaagggcttttcaaaactgagccatattggaaaaaatcagcatttaacctatcctgtgcaagcaagctctgttacacttttagcttccctgcagtgctcaatcaatctgagatagacacactggttcatgttttagcttttgtacataattaataaatcagacatgattctgacctaattctgcaaacctttgttaattaccctaagtgtttagaggtctgaggaaaacagttgtgaatcttaggttttaaagtataattaaatgaatatataccctgtagtttgaagaaaatttgcatcattctttttcagtgagtagagtagccctgaaaggcagggaggtagtagttgaattaactgattctttcccgtatgttgagtagcttacaaggattatctcattagtcctcaaaaaatactgcatactttttttgtagatatagaaatgaaacataaaacaattagaataatttgtccaggatgacaatattagtgaaggaaaagccattcaaacctaggaaatatggctgaagaagtcttgttatatgatagattgtaactttttgttattctacaattggaaaagttctggtgttaaatgactgaaggatttactcaatatcaaagtgtagacttgggagaaataaagagtaaacaatatactatgtgaaaatagtacacacagagtaaacactatatatataaatgaatatatatattgagcttagtactaaatgaaatattgcttaacatttttcctacctttaatataattttaaatattttaaatgtgtttacttatcatactgcttttagtagtagaccatatattctaggttttattttgtggtaatgccttctaaaatattttacaaaaatatggagcaggatatacagccagctgcaggattgagttggtacttgctgttctgatggtcacagtgttaatattggaagtatttatgtaacaggagctataggcatttgtgaacacctagtattagaaaagtgtgccacttcacatatttatgttccaggaaaataataaattctaaaaagaattgtctgttcctaagattataaataaagtcagtgtaatagccaagagtcacaagcattaacctttaaaagatgttaggcaagtgagagggctaagtgggtgaagccctggtggcaagttgacagctagagctcagacttcaggacccacactgtggagagaactgactcccacaaggtgtcttctaacccccatggatgagcttgctgtagcatgtgcatttccacacacagtagtccaaatcacaagcagttcttagaaacgcacaattttgacaggctaaaacagcacaatggagatgttttagttaaaatggggttttgctgttgttagtttaatgtaaactttattacttattttaaatgttgtaagactatagtttcataacaatgagcattaaagatgtttcgttttggggctggtgagatggctcagtgggtaagagcacccgactgttcttccgaaggtccggagttcaaatcccagcaaccacatggtggctcacaaccatccgtaacgagatctgacgccctcttctggagtgtctgaagtcagctacagtgtacttacatataattaataaataaataaatctttaaaaaaaaaaaagactttaaaaaaaaaaaagatgtttcgtttttagtgatactttctaagttttattgaaagaaaaagatacattttacttctagaagatgtatgtatttcatgatgtatagaaaaacaaattatttgtgaagtgcatttcttagtggctttagagttgtcttggagcctttaattattaaaggagaacatgaggaaatgtgtaacgaatccagggggatgaactataacttgtaaaagcctctgaagggtatttttccagtgtttaataaattgactttgctttgctttaaaaagtataactttacttctaaagagtaaattgtctgtttttcaaaataatgccaggtggcaatgtcagatctaaaatgaacacataagaaatcattttgaaaagaaagatatggtagactaaggaaccaataaacactaccattcccacttgctttcttgtatagtagacttttaaccacatagtctggtgaagagatgattggtaaagatggtacaagcttcannnnnnnnnnnnnnnnnnnntgatggtcacagtgttaatattggaagtatttatgtaacaggagctataggcatttgtgaacacctagtattagaaaagtgtgccacttcacatatttatgttccaggaaaataataaattctaaaaagaattgtctgttcctaagattataaataaagtcagtgtaatagccaagagtcacaagcattaacctttaaaagatgttaggcaagtgagagggctaagtgggtgaagccctggtggcaagttgacagctagagctcaggcttcaggacccacactgtggagagaactgactcccacaaggtgtcttctaactcccatggatgagcttgctgtagcatgtgcatttccacacacagtagtccaaatcacaagcaattcttagaaacgcacaattgtgacaggctaaaacagcacaatggagatgttttagttaaaatggagttttgttgttgttagtttaatgtaaactttattacttattttaaatgttgtaagactatagtttcataacaatgagcattaaagatgtttagtgtttagtgatactttctaagttttattgaaagaaaaagatacattttacttctagaagatgtatgtatttcatgatgtatagaaaaacaaattatttgtgaagtgcatttcttagtggctttagagttgtcttggagcctttaattattaaaggagaacatgaggaaatgtgtaacgaatccagggggatgaactataacttgtaaaagcctctgaagggtatttttccagtgtttaataaattgactttgctttgctttaaaaagtataactttacttctaaagagtaaattgtctgtttttcaaaataatgccaggtggcaatgtcagatctaaaatgaacacataagaaatcattttgaaaagaaagatatggtagactaaggaaccaataaacactaccattcccacttgctttcttgtatagtagacttttaaccacatagtctggtgaagagatgattggtaaagatggtacaagcttcagaccttaatgtcatggtttgtctaattctctgagcaagctgaatgacattagaaaatggaagacttgaggtcaatagaagcaatcgaatggtgtaaatttagaacaaaagcaggatgtatttccttagctgttcagctaaggatggtctttacttaatacctgttgggggaaaatgaaaggttattattaacatagccggtgcttggccaggcatgccttattaacagcattcactaagaactagggaaatgatcttagaaattaggaatcatttttacatgtgatatgaagctgtgtttggtacccatactttccctctttgctgtagctctgctggggcaccggggcttctctctgttgggaatcctttgtctaagaatggttgggaccagaagtagcaggtttggggaaatattgtcttataactaataaggtgtgtggaggtggggggtattcaggactaagcagcatattactttgtgctttctgtacatttgatgcaaacatcaaggtaattttatgcagtacttttaatgtatctatattctgactgcattctatcacaggatgttagctgtgaaattttccacttgtgtcatgtcagctgtcaagagatgtgttaaagtactacattcctgtgcttctaagggagaaagaagaatctgcctaaaagtgttgctgattatcagaattaagacttgctaacaccagacagatagtctttccatttcagtatgctgatgtataccagtgctttctaaaaactagaaccaataatgaaatgaattctaaaatagagactcagtgtgtccaaaaggtcaaaataaagttgtactatttgaagccaaagtagaaaaaagagaaagcacagaccattaagcattcttcttgcttttctttttctaccaggtacctctataaagaagcctaagctttcagagtatagtttcattatgcactatataccatagagttcttaaagttacatgtttccttaaaggtatttaattcattgaatatttcccctataaaccactttctgttattgaacatcctgactccttattcagttcatggtatagcaaacagcatctcacaaagtctagtgagcatctcatttcatgccttcaggcccccaaagcaggatgaaagccattctaagagctggtgagggagggttgttttgttttgttttgttttgttttgttttgttttgttttgttttgttttgttgttttaagggcaggatatcttctgtttagaggaaataccctatttctaattatctctctggcacttgatctgtgctagatgagttatattaaggtatgtgcatggaagtacaatagtggtttttttcaactcctcctcaagcttgctaatgcttgcctggaataacgccttaagcacatggccctgcttcctcactgcttggacacacgccaccgtgcttacttctctccccacccttatccatttgtttcttaagcttagagattatcatgacattgctgtgcagttttctgctgcttacttttaagttgaaatctcatttttgtttcagattctccttcttctgtggttaacaaacagctgggatccatgtcacttgatgagcaacagggtgcgtgcaacaggagatgcgctatgcccatccaccatagttttattgcaatgcttagacaaagttcttccttgcttttgcttagtgtatcattttgattatggtcttcagtcactattttatggactaaattttcctgagtggttttgtgcacaaagggctcttttggcctaaacagattatgttctgtgtgaggtcatttctgcctttggcatttttataacaactttgaaatatgtcctttaacagttggtaatgaatataatataatttaaaatcatttagaactatgtaaggttaggatattgccccattgctcatttagaagctatttgaatatagtgatattacacatttctagtgttatggtaatgacacttagttttgtgtcatacctaactgatgatggagacaaggtcttctatgtagcccaagttggccttgaactaccagtggttttgcttagccttcctcctgtgtcctgggattacaggaatgctgccatccatttttaagctctatcctcttaaacccagaggtagatgggaagctggacactcagcggggaaacactcactcttccatttccaatggttcttttttgaagttagcagaggcatagactcagactcgtaggcttgaggagagcaatgtgcaatcaacaggtttatcagtcaaactttattactagcagatttgatccagtgcagagagaactgggaaaggaggacattctgacaaaaaagaggtccatggaaaggagagtgcaggggagactgaaggaagctgtagtgcttgctttagaattaaaggcaaatttcttatgatctcaactcagaattctctaaagggttctaagcactctgatgtaacaatgttaccgatattaagcaacaaggaataacttgaatttacttatttgtttacatatgtatgtatgtatgtgtggtatgtgtgtgtatcggggccatgccatggtgcagtcttagtgatcagaggaaagtgatcaggggtcagttcttccctttgattatatgggttccagggattgaactcaggtcaggcttggctgcaagcacctttactgctgacccaactcaccagcttgatttcatttatctcaattgaaaagggcaaatgggtagctaataaatttcacaaatttctttttaaagattatgaataagcttgaaatccatagacttgactggctaaaaggtggcaaatgcaggactcaccagttcattgagtaagggaatcaattttgctgtagaatctaattgtaatcttcttagagaaatgttcaaaaactaaatttaaaacattttagaaacttgtgtaccttcagtcttaaattatttatttgtaaacctgttcttaaaaaataaatctaaaaaataaataaataaataaatctaggtgtggtagttcttgcctttaatcccagcactcagaaaacagatgcagaaaaatcaccatgagtaagattgaaaatctgtgtcaaaaaaaaaggcaaaatgcaatgagaaaaatgaggcaggaggtaggaaaataaaaaataactaaatgtgagatatacaaaattaagcatattttatctttacacagtaataaaatgggatacaattatagcatcatattatataacactatagccagattcatgtttagttaaccatatggaatagtttctatagacttacattgaatattatacctaatttagttgccacttcatttatatatggttctgagatataaaaaagagaagactcaagtttaacctacacagttttagcctcagtgtctggatgaatggggatgccatttagttaagttggctagcttacagatagaaattagaaggatctttgttttgggcccatgtaatgtgatttaccatgtagttgtattaccagagatgtttttataaggtcaaatatcaaatgtgtttggcagaaactacattgtaaacagctgttgtagttttgagataaagcccatgagcagaaatgtcctaataatgggaaataacctaagcacacgagtttacctatggcaatatgtgttaactgactacagaagttaagatggcggtcaggctggagagatggatggctcataagaacattggtggctcttccagaggtcatgagtttaagtctgagcaatcatgtaaccatcgataatgagatctggtgccctcttctggtatccaggtacacatgcaggcagagtgctgtatacataataaataaataaatcttttaaaaagaaaaaagttaggacagcatgcttgtcactagtctttctcttttggtctaattaatgtaataactttcttttggctattcatgccactgtgtattctctactagcaaaccaagtgaactttgaaaagtgtgtgtgtgtgtgtgtgtgtgtgtgtgtgtgtgtgtgtgtgttcatgccatgtcttaaaagccaaacatgagctggtctttatcttcctaaccagatttttgatcattgccaagttgcctgcagtgtgctgacactcagctccttactctctctcagatggcttacacactgttcccactcccaaacttaagcggtttctacttatccttcaagtgtcaatatctcaacaatatgacctcccagtatatagtattttgtcttttttcattttgtggccttgttaatggctctcattagatttgcagtcatatatttgtttggaggattgtttcatgtatacctctctccatagtctatatgtgatctttttagtcattatcacatatatatgtatttatatatgatatatatatgtgtgtgtgtcttcaatatgcttctgctttccccaatttttatatatgatatgtttatatacatgtatgtatatatatatatatgtgtgtgtgtgtgtgtgtatacatatatatacacatacacacatatgtgcagtgtatagaattttatcaattccatattggtatcattttatatcaaaacataccaatattttgttggggtgttttgggtgaaggaggcttgtggttggttttttttttttttttttttttgttgttgcttatatagggtctcactatgtagtcttggctagcctggaaatctttatgtagaccaggctgtcctggaactttcagagataagtcacatgcctttgcttcatgtgccgggccgggattaaaggtgtgccacatcatgcccagaaacagtgttttaaaataagcagattaattcattaaatgatcagcgctatagaaattatttcagtttggaaaattcagcctaacaatcaggtttacatcctgaaattttcatttgggtaatatataagaatgaatggaggataagagagtcagagcatataaaaaatattgtaatgatccaggtaagagacagtgaaaaaaccagtctaaggcagtagggtgggaaataagtaaagcttaacaatctttgtgagtagaataaatagaattctggcttggggtagattgacaatatgataattatgacaacaaccggggtaatagtaagtgatactttgaaacgcgctagccagagattgagaaaacgatgtctacgtatcttggtaagattatagtaaaccataagatagagctttcaggaaaaacagatagctgtaggggaaagggtctgtatagacatcctttcacatgttggctttggggtatcttagaatgttttctcttgctgttaaggagtatttacgggctgggcatggtgacatgtgtctttaatgccaggacttgggaagcacagactggtagatctcttgtgagttccaagccagccaggtctgcatagtgaaaccttgtccttaaaatatatctaaggggagggagggagcgaaagagagaggtagggaagcctgaggctagttatgaggaaagaagttttgactcacttggtcatatgctcttctgtgcattgccaaaaaaaggggcaggggaggagtaaaagcagaagtgtactgaagacagatgcccaatgggaaagctaggagagctaaggagaccatattaggttggtaacagctcagcctgccagtaatgtacacaatcctctaaggaagaactcgttcacttcttcaaggagatattaactcacatgaggactctattatattcatgacaccaacaccttcttacctgctgcacgaacagccagtgatataaatgtatataattatttaaaattttttcatcagtaagataaattcattgaaactggaaagtgttattagtaacctttttgtctttggtaattacccccaccaaaaaaatatctcagaattactatggggaagttaaaagatatagaaagcacctggtcacctaggtgatgctaaatacacattttaaaagaagaatagtatctcttcataagtatgaaaaggaaagcaaatgtgtagtcagaggtctggctttgttgcccaggccgaagtcttgtgctcagtcccattttagcctccaagatggctgggactgcaagagtgtatctacacccctgactttgtctcacttgttttatttctttaatcaatgtgctttctttaaaaaaaaatatttattcatgtagaagtactcttgtctacatgtgtacctacatgccaaaagagagtatcaaacccctttacagatgtttgtgagccaccatgtgattgctgagaattgaactcagaaagtgcagccagtgttcttaaccagtgagccatctcatcagcccaccgatatgctttctataaaatgatagagaaaaatgaaaaacagacattgttatttgagtaaaatactttcttatattcacaaaatttaaactcgttggcaaacacaactctcctttgctcttctttgctatttatggacaaagcacaatggtatctacaaggctgcctagaaaaaaattacatatgatatataatttttaatatatatttacacacatatatataatagtctctcattaagataatgtagaaaaaaggaaaggaggaataatataattataagttcaaaaaaatgaaaaatgtatagaaagtagtaattgaggatagaggatatagctcttagtatatacaaggacacattcacaaaatttaaagttgtgggcaaatatatggatgtttaacacccatgttaaacatcaaaatatatgttatatacatctattatatattatatagctacagtgacctgtatttacaacaaaaatatatgtgtatattataaatctgtacatataaatataatatacatatataatgcttataatatacatatataatatataatcatatatattcttttatttgagatagattcctctcactgtgtagacctaactgatctaaatcttgctatgtagaccaggttgtcattgaactcacataggaccacctgcctacacctatccaatgctgggattagaagtatgcaccaccaaggtcccctttgaataatatatcttttcttaagagttgaggattccgaatgttcttcattgtggtcctaaactaaattcaagtattcctgagcacctgagacaacaggcatgagttgcatgcctagaaagataatacattttaatgagaacttcagttgtccttttgtatctaatttctaatgcttattatcctaaaaggaaaaattcacacacacacacacacacacacacacatacatatatttaaccaggcctgaaatctgaaatcctcctgcctctgcatcaccagtgctgggatcacagatgtacaccaccacgcccccttattttagtttttaaaaaaaattcttttgaagagttaatttgggggagggcataagaaataattttgtatatgtttaagtctttgtaatgatcaaattgttttatacttattacagtgatacttgttaagtaaaagctaaaaaaaaaaaaagtatgtcattttatgtaaatcggtttcctgtggggttaaaacactgatctgtataggagacttagtgggtagtcacaacataggaaaactggtttgactgaatcttctggggtagattaggaagtggaaaaagtggatttgttatgaattaaatatttcttttagactcatacttgtatagtataacaaattgaattttgttgttgttttgttgttgttgttgttgttgtttttcgagacagggtttctctgtatagccctggctatcctggaactcactctgtaaaccagactggccttgaactcagaaatctgcctgcctctgcctcccaagtgctgggattaaaggtgtgttccaccactgcccggcttgaaattttaataatatcatgagaatatcatattagttttatttatacaacactcaggattgacaccaggcagtacactaagcaatacactaaccctttgccctttcttacaactttttataatttttattttttgagattataattacattatgtcctgctttccattctctctgtattttttaataacagaattgaagtgactagcctggcctcaggctggatatcattctgcctccatctcttaagtagctgggcttactgccacttccaggtctggctcaaatagtattctaagtagtcattaattacataatgaatttttaaatttttagtaaatagcaaatatttaaagcctgtatattaatgagaaatattagttcagtatttaccatcccagaacacatctaggaacagtatatcttaaattctagtgtatttgttaggtttactatttactggctggttatttggaatgaaatgactatggtgttctgcctcatctgactgtaaagacaaaacatacaagcgtgataagtattgaagaaagatctatatattgtgtaatgagtatggctttgaaataatttttagaatgtgcttgctgttctaaattaaaacaactaaacaaagtagaggaaacctaaatgcttataagtatcctttaagcaatataaaaacaaagcattaatttgtaggtcttatttttttaaagattgatttatttattttatgtatatgagtacacggtcactctccagacacaccagaacagggctcccaatcccattacagatggttgtgagccatcatgtggtcgctgggaattgaactcggggcttctggaagagcagtcagtgctcttaaccattgagccatctctccagccccaatttgtaggtctttaaataatttttcttttttaaaaaattagcttaaaatatgtattttatcacagtaaattatatccattttcaaattttattttattattgcattgtatatgcgtgtgtgtgcctggtgccaagggaggcactggaatccctggaactggagttgcagatggctgtgaccttcatgtcaatgctaagtcctctttatcagtcaaagccagggtctctgtaagagcagtgctcttaacctctgagacatttcttcagcccccaaattacctccatcctcagctaagggattgacattctgagaaaacccatctcaataaactgtatatagtcatgcaaagcagcattatgctaaaagagtaggaagaggaaagttagaaataagttctaaacttgggagtctgaaggttgagaacccaatgaaacagtccattccatttgtatagtggttggccagttgaagccaaggttgataagttcatttagagttgaaaggaacaatattaatcagctgtactcattttatgattatatgaagattgcttcattttatgactgtgtttgaataattttgtagtagatgactctaggaaaaaagtcgtgactcttgattgcctggagactgtttgctggggacgggttggctgggtgtttgttgtacaaatgttcacgaaatgtttcagcactcctctctcattttcttgctttggtttactgtatttctgtagcatatgaatttatataattgtctttattttcttcaaaaacaaggtttttcggttttgtttgggggttgtgggttctgttttggttttgtttggacaggggtgaggttgggaggttagaagagtgatgttggctttcctggaactaaagttttaggaagttatgtgcaatctaacatgggttctgatagtttcactcaggtcctctaagaatacagcataatatctcttaaatggctttcctttttcttccccccaggaaagggtctcactgtgtagccttggctgtcctggaacttacaatatagatcaggctgaccttgaactcagatctacctacctctgcctcccaggtgtgggcttaatgatgtgtgcgaccacaccttccattccttctttaccttagtgggaaaataagtagcaaaatattttataagatattatattctgtaaaagacaagctccagctctgcctgtgtctttgctcatcccaggcattcgccatagcccaggtacagcaaccttaaagcaataatgactttgtcatcagtgggatggaaatctgtggcataactaaagaataaagggaaactctgtgttgaccaatgaccctttcttgatgctgtaaaaaaaaaaaatgtaaaaagcaaaaaatgcctgagtaacctggatttttaaagttgagatttattttcggaaaagtagctcattgttacattagtcttgcaatggatgccaagagagagagagagagagagagagagagagagagagagagagagagagagaccacagatgagttttctctctggagacagctagccaaagggtctgatacttggctttgtgtccatttctattctctgtgtattctcatgtttccgcaagatgttaatgactatccaaataggaagttttaaagttctacttcattttgtccttgaatatctttttgctatttgggagagagaactttgaatagtctctacaatttctttgacattatttgccattttgtttaatcaagggattaatttagacacggggtcttactaagctaaatttccttggctgtcttagaactcactatgtgtaccatgttgtagtcatatttggagcaatccacttgtctttgcctcttgaatgcaggggttacagatgtgtccagccaaaagatgaagtttttcctttttgagacaaggtctcactctgtagcccagctggcttggtgtttactgtagagcacaggcaggccttgacatcttgggggtcctcttgtcttagtcccctaagtgctgggattataggtgtgagcaccatgcccacctttatttgcatttttaaaaagacactatatatatatatacacacaccctataaaattttaaggtaaaattactgtcctttattaagaaataacttctttacaagattaattaagaataaaaactgaaatatactaaagcattgaaacaattttttgaaaaaacaaaaaaaaaaaaaaaaaaaaaaaaccaaagcacagtatactactacttccttgtggtagtgtcctgtgagaacacagaactcagtagcatttaactgcagcagtcagaacagctggttgagagccttttcatcttgtattttagccactgctaatcctttctgatgctcaagcaacaagaaatataccatgggtattctactacataaggcaccagtttataatgtgtcattgcatgttagtagcttttgattccttatcgaaagggtatggtttcctaaatctgagggagtcatctaaacaaagctaggattgataatgttgctttgaactttaaatgagaaccctaacatgagcaaaagttagacagcaacctaacttaagttcttttaaattgtaggaaatgtcatattttttttgctggtttcagaaactttttcaaatgttttaaacacaattttcagataacagtaatgagaggctgagccccaaaccagggacaggtgaacccgttttaagtttgcactacagcacagaaggaacaactacaagcacaataaaactgaactttacagatgaatggtaagttaacacttttgtaaagatgttcttagctgttttatacaattgtattcaatatgctttttctgtgcttcattttatgtcttgttttttgctatttactgtattagttttgaacctgtagtatgtcctaaattccgtgaagaacttgtagctaaacagatgaggtctctgcagagatgatcattctcagtggatgagagcccttgctatcagtcatgaggacccgagtaggaatccctagccataatgtaaaacgctgagcattgctgcacatacctgtgcatgactgtagccttagcattgggaggcagagagactggcagatcccttgagttcaccaatgagtttcctgttcattgagagactctcaggctaataggtggagagcagtagaggaagacacccaacatcttcatggggcacgtatgcatgttacacacacacacttgcatgcacagaaaacaagtaaaattcataaaactcacagatcagtcaatcccatctgcggattaggtgaaatcagaccttagcatttacatctctagaaatttagcaaattgtgtttgtcgtcctgggatgtttgttctaatagaaaatacaaacaataatataatcacctacagagagcattaatttaaagtattttaatctttgtcctttgtgtttgtgtatataaacatatgctcctgatttttgttgtccattttagaacataatttaaattattctgaatatgctcccttctgcatttgctaaacttaactctatagtaagcattattaactgcaaggaagcattgcatcgctttcctcctgctgcctgtgctaactgttatcttactttcctcctgctgcctgggctaactgttatcttactaatctatctggcaggggtgctggaggtcacttactcccctttcagtggaaagttaagttgccatttttaacccgttgaggttaaaacccaatgaaagtctttctttttaaaagattttctatcttcagtatctgtgagatatatctccagagatgaactgtttaggtcaaaagtgattgccagctgctgttttctctttccacatttctctcagtgtatgaacattttactctctgttcaatgtatttatttttcactcttgattttaaaataactttttgttatttaattaatagaacggttggacttttatactcacttaatactgtactggttgcctttaatgacatttgtgattttgtccatgattagtttaagaaataaatttatgtaaacattatctgtcctgctaactagaggccttttgattgagcattatctaaatatttttattcagccttgtttaattagtagtatatgaatgttttttgacagtatgacaatttgtaattatgtgctggcataatgtaacaattatatctttatgtaacaattatatcaattatttatagtcattttaattatctatcattaatatatcaaatcacattaatatattaaatttatgtaaataattaatataccatttataatataaagtatattatgtacaaataatatatcacatgttaatatatttattcatatataattatgttaattatatatgaattaatatgtgatcgtatgttacattattcagttcactggtttgtgtataaatgtattttacagtaaagtctgattaaataggacttcagatattattggagacctatgtcccaagtactattctagacgttggaaattcataagttaaaaaaaaagttaaaagacaaaagaaatctgtgccctactggagcttacatttttttaggtggaagaactgggcaataattacaggaaatgagtatacagtgtagcatgttggaaggcactgagtactacagaagcaaagagagcaggtaaggacaacctcctgatgtcctaaggaaggttagtcatcaatgagaaaatggcacatatgtagggaagaagattgtaggcacagtgacatcccacgtgtcctatatgttcagggatcttttaggaagctcacatatgtgaaatggaatgggcagaggagaggcaggtgtgtaacagataaggtaagctgagaaaacgaagatggtgttgaaacagaaaggatgcttttgttcctgtgttcagagtggaccataggtagaagtccatgccaattaaaagactatggccagaagcagaactagcagtggcagtgtgttgtgccagaatgggagcagtagaggctgtgaagatcatcagaatctaggtactgttacctactactaggctactgtgtcagccaacaggattccttaatgaccccaagtgtttaccacaacattttaaaatcatcacatctgtggccctgggctacgatatataatttaacacaggttctcgtatctatcacttatgcctgacctcttctgctttcatctttctatacaagctgtctctggggaagaatgccttcagaacagttctaagatagttttactctctttttttcttcttcaatgctaatttcactttaagtgatcataaattttattatcatccatcagtttgtcaaagactaccatttctactttaaaatattcaatatagtagaaattaaagcagaacattaaaaaaacagtgcatcttttcttactttagtattgtctcttgctttttagtgtctttaatgacagatgagtcagtagagtaccctgtgaggttggcctctcacttgacagcctgaggaagcttcctaaatcccagctttttagtggaaatgggcactcttaaaagaacccatttctgaggtttgttgagaagacttcaagggattttacagagaaagcagcttaaacttagcacactttgtatatgctaagcacttcgtagttgttaactataacagtactcttattctaataatttggctcattttctgctgcggtctctgtcctttcttgttggtttatgaaagctattatcgtacaatgtgagggtgatgtcaggagttatgtttgttccagtgtctcccaggtatggcggtcgttcttcacctgcagtggttgtgctttaaggctgtgctgtaatcctcctgcttggacagcagattaggggaaccctttgcttatctgacttccgtgttttctatagttctatagtacaatcacctgcttactataaactctggattgttttgtagcaagtgtgatgctgaactacagcatcagctttccacacactgttcctttggcccagtgccatgtattttgcactctcctcatttcactgtgatttattgtgccatattaactatgctgaatgtgtgcacttgaggagtgtgccttctccactagattctattcctatattagtaccataatattttaatcatcatagctattgtgctctatgcatttatttatatctgtattatagttgtttcagcaaggaaaaagcttgtatcatatttggttatatcgaccacaatgactttgtagtctcttctcgttaaaaagatatttacaggggccagaaagatagttcagaagttaagaacacttgctcttttcccagaggacctaggtttggttcccagcacgtgtatagtggctcacaaccatgtgtaactctgttcccaaaggatcagatgcccttgcctgactccttcacataccagacttccatatagtacatggacatgcaggcaggcaaaagaaaaaaaaaaaaacaggtatcaaaaataaggaagagaaggaaagggaggaagggaagggaagggaagggagaagggaagggaagggagaagggaagggagaagggaagggagaagggaagnnnnnnnnnnnnnnnnnnnnnnnnnnnnnnnnnnnnnnnnnnnnnnnnnnnnnnnnnnnnnnnnnnnnnnnnnnnnnnnnnnnnnnnnnnnnnnnnnnnnnnnnnnnnnnnnnnnnnnnnnnnnnnnnnnnnnnnnnnnnnnnnnnnnnnnnnnnnnnnnnnnnnnnaggacaggggagggaagggaagggaagggaagggaagggaagggagacaaaataatcctactgagacaacacttttaggctactttaaaactcttctgacatttttttccatgtataccaatataggtcattattatataaaattgatttttgttatttgccttaaaacaagattttacaaaatcttggcaaaaagtccttagtaatttgcctctcttttggtttttcaagacagggtttctctgtatagccctggctgtcctggaactcactgttctggaactcagaaatctgcctgcctctgcctcctgagtgctgggattaaaggcgtgcgccaccacgcccggcggtaatttgcctctttacatttatctattttctgcacatgtatatttgtgtgggtgcatgtcatggcatctatgtggaagccagaagacatcttggggaattgtctgtctcctcccaccagtggcttcctgccgtctgtcttactctggttatcaggattggcaattagcacctcacccactgagccatctccgaggctcataatttgattttaatctcagattgttaaacatcttcccgtttccttatcaaccttccccttacacatgtaccatgatttcttatggaaattatttatttgaatgggtctaatattatgtgatagccagagatgctaatgggactttagccatcattgggtgggtattaaaaccaaaatagaaaatataatctctttctacaaaactatcatgcttaataaatacacacacacacacacacacacacacacacagaggaaaggacagttaatatctcactgggggcagttcaaaaagactgaaaaaatggccaggcttccattcaacttgattttaagccattctacaacattagagtctaaaaagaatataatcaagttctataaaaccattaataatttctatggatagaaagagagacagtataattcatttaaacttccatagaaactggggctgaaggtgtgacatattagcatatattagaatatagcttctgtgcttgattcccagaacgcacacatacacacactcattaagagacacatagaaatgtatagtagacagtaggagcatcaaaatcatgaattaaagtgctttcattataaaatctttttagatgaagcgtgatttttttttaaaaaatagcttttcaagtacttatgttctaaattttctaatagtttttaagttgtaaaatatgaaagttacatcaaaatcctgtgttaacttttggtggtatcacgtgtgttcttgtgattttaggagcagtacagcctcaagttccagaggaaatgggagccattgcaaatctgagggtcaggaagaatgcttggtccctccgagctctgtgcagccaccggaaggagacagtgaaacaagttaggttactttgcctttttcctcattagaaacctcagtgctgagtacctacctctttttctctgttcctccacaatggttcacctttgtttgttctttgtagagtgatattttgtcctataacttacgttgtggggtagaggcttgtggaggtcagaggacaactttgcgagggcagctccctccttccacgtttacttggttctaggaatcaaactcaggtctccaggcatgcacttggcaagtgcctttaccctcaaagccattctgctcatccctggggtgagattgtatttgaatattaaaggtttctatgatccagatagaattaagagccgcttatttaaaaaatgttggagtgttgtatttatatttttctgtaaaaagctagatttcatgataagcttgtttaattccaggagctcctgaagaactatcagagaaaggaacacttccagaaaacctcactcaaaaccagatagatacaggtgagtcatcttagcgtctttaggaaaattggctcatatacaaactaaacaccttaatctttgtaatctccagaggcaaaggtcacttccaaatggtggccctagagtcagacttcacattagaacacgtcagttcctaagtgaagtcaaatgatgaacagtgacttgcatacaactttgttttctgacagcacaacttgataacttcccagctgagccattggattctaactcaggagagaagaataacccaagtcaggacagcccttgtgggcttccagaagaaggcactttgtctgaaacagacagggagacttgtgagcaggccagcactgagagtgctaccaggcatgctagcaccaagcctgaactcccatcccagacagaagccattgagcaggccagcactgagagtgctaccaggcataccagtgccaatcctgaactcccatcccagacagaagccatagcacctttagctcatgaagacccatctgccagggactctgctctccaggacacagatgacagcgatgatgatccggtcttgatccctggtgcaagataccgaacaggacctggtgataggttggtacatttttaattagcatagactataaaaaatgtaattttacaagagttgaagtcatgtgaaagtctcaccatttttaaagttgtttcatctagaactgtcacaatcatatgacacatggaacttttaaaccataaatgatttcacgtattctgagcagatgtatgaagagtgaacagagagtgtctttgctcagtatttctgccctgaagcttatgcctcagtttacaagtcaagagatggcatgccgagaatgactaatgggttacttataaattaaggttacattgagttgtcagtttgccctgtagagattatggcttttgggttttgctagtttgtttattgagatgagggtctaactatatagtcttggctggcctggaacataatatgtggaccaggctggcctggaatgtggtatgtagactgggctggcattaaactcagagatctgcttgcctctgcctcccaagtgctagaattaaaggtgtgcacaactaagcctatttttattgtaatggtacttttttttctttctctctttttttttttttcttgtccctagtagtgtgatagtagttctcttcttggaacttttatgtttttctctgttttctagtaatgtaatgactcagttaagaaactaaaaaggtatggtggatagtaaatattgtagcaacaatagggaattgaattgttaaatgtttgtatgtttttttccattagtagatttttacataaacaaaaaatttttattttagaagataagataccctttaatggtctttaaaatgcctgggtctgatggtacaagcttgtgaccccagctacttagaaggctgcagcagcaggtcccaagcccatggtctgccgatgcagtttagtgagattgtctcaaaataagaggtaaaaagaaaatggtaaggatatacctcacttgttagcagggagactctgttcactctctggtacccaggaaagaaagtgtgttgtatcctgtatgtgggagactgtgtgattagtaccatccttcccattgttccagaaaatccagttttatctttaaagtcctgattcacacaggagtgaagttctatttggaccattcacacacacacacacacacacacacacacatgtatgtatgtaggttgagtaggctattgtttctcaaacatttagtttacatttctgacacaattaacaagattatatattatatatgcattttacatgtataattaaaagattactataccactaaaaatggcaatccctgtaatctgagtaggaggagaaccgcagcaggaggactactgtgagttcaagaccagcttgagctacatagaacattacaggttagcctggctacagaatgaaacacgttcaaagatcaaaaccaaaaactatggcaatgttgtgtgattgttaagagcatcataacttgggcttggatccactgtcaccacctaaagcaagttgtctcatatacgctgcttattgattgactcagagactgttttcttatatatgacgtatgcttatgattatctagattattgtacaaatttaaaatgagtcggctatcggacctggctcacattgaaagatggatacatgtcttaaacaaccggtgtattttctgtatgagtgccttcattctaagaaaacaattattacagtatactggctcagccagcaacagtaatacatgcctataattttagctacatgggagactgaggcagaattatgtttgaggtctaacttaggcaatttagagagactgtctcacaaagcaaaagaaaaaaaaggaatgcctctaaggaataaaggttgaaaaataaaagtaataaaaagaccagcttttttagcttagtgaaaccaactttgctaactgtggaagggcatgtaccttccatcaggttggagaaatggttactttattagggcactgttcaaataatcctcccttatgtttgtgcttaaagattaaccttccatgtgttaatcatcaacctcctatgatgtttgattgtttagttggttggtttttttgttttgaaatacagtgctactattagccctggctggctctgtaactcagactgaccttgaagtatcaattcaagtgctgaggttacaggcatgttccactaatccctcagcatcacaggtgtgtgtgtgtgtgtgtgtgtgtgtgtgtgtgtgtgtgtgtgtgtttccttaaaaggtcattactgctaaataatacaggtaaggttaccaagcatagcacaattcaaaaatcatttttatattatttacatgatttctcattctcctaaggtttgatctgccataaagttggtgcctgatagcttgattaacctagaaagctctaggtgttaaattagattagctaaatatttagaagattgataattatggatagcagcctggaactaagcattagcttaaacttagatgttatgattagatacagattttaaacttttaaagacttggtatcacttaataagtcaggtaccttagccttagtttggccttagttacttgcttttatagaacataaatttagactgataaatttaaattcttttttttcacaatttttattaggtatattcttcatttacatttcaaatgctatcctggaaagtcccctataccccccacccccttccctacccacccactcccacttcttggccctggcattcccctgtactggggcatttaaagtttgcaagaccaaggggcctctcttcccaatgatggcccactaggtagaggctgatgggtctctaagtttgggaccagccttccaggccaccatgggctacacagagactcaaaaaaaaaaaaaaaaaaaaaaaaaaaaaaccaaaaaaaaaaaagacttcagagagatggctcagcaattaagagcaatgactgctcttctagaggaagagcaaccacatggggttggttataacaatctgtaatgggatcctatgcagtcttcagtgtgtctgaagacagctacagtgtactcacatatattaaataaatgaataaataaataaataaacgtcatttacatttcaaatgctatcccctttcctagtttcctctccaaaagtctcctataccctccccctccctgctccccaacacacccactcccctctcttggccctggcattcccctatactggggcatataatttttgcaagaccaatgggcctctcctcccattgatggccaactaggccatcttctgctacatatgcagctagagacatgagctctgggggtactggttagttcatgttgttgttcctcttatgaggttgcagaccccttcagctccttgggtactttctctaactcctccattgggggccctgtgttccatccaatagatgactgtgagcatccacttctgtatttgccaggcactggcatagcctcacaagagacagctctatcagggccctgtcagcaaaatcttgttggcatatgcaatagtgtctgggtttggtggtactcacatatattaaataaatatataaataaatctttaaaaaaaaaacccatctgccccccaaaaagatttgcttcatcttttcccagttttgtctgttttgttttgattttatttgtttttgttgtttctgtgtttttgcttgtttttttaaatttattaggtattttcttcatttacatttccaatgctatcccaaaagtcccccataccccccccactcccctacccacccactcccacttcttggccctagcattcccctgtactgaggcatataaagtttgcaagaccaatgggcctctctctccaatgatggccgactaggccatcttctgatatatatgcagctagagacatgagctccgggggtactggttagttcatattgttgttccacctataaggttgcagacccctttagctccttgggtactttctctagttcctccattgggggccctgtgatccatccaataactgactgtgagcatccacttctgtgtttgctaggtcctggcatagcctcacaagagacagctatatctgggtcctttcagcaagtatgcaatggtgtcagcgtttggagcctgattgatccccgggtatggcagtctctagatggtccatcctttcgtctcagctccaaactttgtttgtgtaactccttccatgggtgttttgttcccaattctaagaagggacaaagtgttttttgttgtctcactttatagttcaggggccttgaattcaaagtaatcctcctgcgttggcctccgaagtggtggttttacagacatgagccaccaggtccagcctcttctagctctttaccaaaaatgtgtaaatgatgaaaaccaagaattctccacctgcttgctcctcctatgctgtctcccatagcatcatttgctatataattagagctcacccagtaaagagtgcgtgcgcctgtgcctgctgtggctgcccttgcttcatccttgaggctgctgtagcttgttactgcttagtgagggaccacttgccatggcctcgggtgtagttcattgcttctaaatttagaagtaattaataagttgacttatattttaaaaggagcaagttttaagaaattttactaataagaacccaaatcatttacagtctttaaaattagcaatatttggactactttccgtttctgaagaggctaaagtacattgtgcacattgttgaaatgtccagctaacagaatacatgccttagaagtcactcttctgtcgtttgatcactccaggtccggtctagaagtccagtgtgctgaaaatgtgcccacaacaatttcttgatgctattttaaaagcccagtcaattaatttagttagggtagagaaatggtcctcacaataagtatggtaaaagtcaaatagttaaaacgttaaaacatgtagttagttgaacttcatcttaatttatatgaaagctatagtagatctcacggttgcattcttgtgagtcaggatcttatgtaccttgaacttgctgtgtatttgaagatggcttttaatttctgatcctcctgcccccaactccagtgtgaggttacttacttgactctcagtattcttaaaggtttgtttaatattaagcaggtttgcattctggggctgaaaccaacatgaaaaggcaaagccttagacacataggccacaacagtcatatgggtattttaactgtggagtgctcgtctctaaccatagcaagtctatataaaaacagctggaacaggtacaggaattcagacaatttttttctcccacaaggccagataataaatattttaggctttgctgccaggcagtaaagtagaaactactagtaggcccttatatagctattttaaatgtaaccatttaaaaatgagactactggccataacttgaaggtaataaaagaacagctgaccaagattttacaatcttttatcaaggttaaaatatattgtgttcactaacggtggtattaaagacaaaataaaattagtgtgttcagtccttcagtaatttcacatgttagacccatgagcatcagaatggtccttagaatgagagcacctctcttttcgcttagacggtatctcattgggtgtagccctggctgcctttgaacttagagatctgctggcttctgcctccagagtgctgggattaaggcctacagtgccagctacattgtggagtaaaggaaatggtggctttgttttgctttgctttgcttctctttctttctttttcctaaatcaagaaaataaaattactccagaaaaaagataagcaaatgagactttgtgaagtccttaatgctcagatagctaaggtgttattgtgctaatgagtttttcctaaagacttaatcgtattaattctgtattgctttgtgatttttaaagcacatatcatttgcataaaaattttggtccatctagtctttctggactctgtaaagccagaattccttgtactataaatatgccggcatctctccactcattataactagctcattctgtatttttaatgattctgctcgccttattaaagaaaattgcagaggaaatcatcaaagggaaaagctagggctcttagggagttaaaagccctggtactgggctggcttgttccagttctgtggttaggacagatgagtcagcttcattgtgtatttcccagagagcaattagccttgagggtctgcaactgtgggtgttcaaacggtaaaagacatgcagtgtggtctccttctaactctaattcagtgagtgtatctgttcccttgatttcttccttcccatttctttgggtgacattcctcaccatggactgcgacaaagggaaacagaagtcctttagactgaaatggttgatgacaaaaagcggtgactgtgatgctgtacatacttggttctctgtaagtgactttagttattgtgttcccttcactagatttaatatcagaggaactacagtaggtgatagaataatgaggtaatgaagtatgctccttcatttcttctttacgatggatttgccaggtcctcttttctacggctaaccacctttcctattaacagttaatacttcctttgaacttactgaacgcataagtgctaagcattataaataggttgcttttcacaatctgcatttctctgcatgtgctgcatgggaaaagaatgagaagaaatttcgtgtgtgcagatgtaattgctgttcacttcaagtgtggtgacaagtagctatggtctaaaatggggtccaaggtactcgttttgatagttggttaaagagtgcaacttatgtttttttaaaacttgattggcatactaattaacagtttttattactcatatgtacttttaattcttttaattatgttcatttaattctgtggtaggttttaaaattctgatttttcaatgacactttcttgcaagtagctaaataacttaaggatagcacataccaagatgatacccttaactatatctctaattgaaaagctgagagtgttacacagcttttagtagaatgtttaaagtgaaccctgtgttctaacagtcatctgcccaagctgcttactgagaaagattaggcaaactacgaagtggcatgggttttttaggtattatcagtttctaaagtaaagttgtacataaaatctatagtagcaatcaaaattaaaaatagtttcttatatggaatgcagtaatagtaaaataaaccagattagcataaatgtatagtaatatctgcttaaaacctgtccttgggaccttaaagtaagtttaaatccatttttgcttttttgaaaaagctttatttctatgattgtatgcatatgagggcacacactacattatgggtgtgacaatcagggacacttttgtagagtccattctccccttccagctttaggaaggatccagagattaaatccaggtcaccagcaaagccctcagctttgtttcatgctggtctttgtaggctgttttaacactaagatatattttgaagtcaataatgattctgttactagctatactttttaatttaatgacaccaaaatgtattctatttcagggctttttgatgtttttaacttactaaactttatcccaagtattcaaagctggtttctgcttttaaaataaagattgcaactaaaaagtaacatgttgattcaggtgggtcttaggttaaaaccatataaactgaaagagactaatgttgaaacagaagacgtcactgcctggccccttgagggaatgaaagggcctcattctcagcctcaggtctctgtagaggtttactgagtacaatcttaatgtaaggcagcattttctgaagtctcacacacagcttgtttacatttctgctgaaataaattagaaatataaaagtataagagatgacagtcctcacgagagactgttgtattttataaatatgctttactgtactgcaaatgctccgtgccatgtcaccatctcttttgaataataaaatggcagtagtcctctgctctttctccctctggtgtccatcctcagctagactgagagatgagattggtcaggctgaagtgatcacaatcccacaacctggtgaccacctgcattcgggtggcaccattttgatgctgacatagctcaagcaaatatcctcctccttctgcctccagaacaggtgggacttgaggcatgtacttccatggccctggacctactacttgtataatccacttccaagttccacacacaaatcctcagacaatggttacaggtgtaataagtgtatacatttcagggaaaggtgaatatgatatggttacctttgtatttattaacacttttttaaaatgcctttgagtggccggggagacagctcagtggttaaagtgcatgctttgtaagcagtggggcctgatcttggatccctagcaggaacataaaaggcgggctcaatagcacacttctgtacccgcatcatgtgagtaggcggagacagattggtcccagggcttccccagctagtcaatctagctagaaccggagctccagtgtccgtgagaagctgtctgagaagtaggtgttcatgatttccgtggcagctcatgagtattagctattgtgtcttacccaactctgaagaggctgcccactggtgtttctagggtttgtttaggactgttagggggagcttataaaaggttccgaccattcctttctgtcttgctgtgttaacagtgtctgtcacgagtgggctcagcttagtcagacacattttcactctgctcagttatcatgtcttaaaggtgttttttcttctcgttgtattaaataactgataacattcattagtgctttgaaaaatttggaccaattaattttacatttgctcctttagttcttcagtaagcttgttagtcaaatgctctgttactctgtagagcagttttatgaatgctttttaatttgcctggatagcttggagtataccaatttttaatttaaaaaattttaaacaaaatatggaaatacataattgtaacatgaaaattctcactcacaacttgctgttcccaaactctttctgtgaacacataaatttgcttttctctgaacatttaaattagtgcctagtcagctgcagtttttactgaggaaatatgtatttgtattttccacaagatttttttaatttttttgagacagggtttctctttgtaaccctggctgtcctggaactctatatgtagaccaggctggctccaaactcacagagatcacctgtccctgcttcccaagtggtaggcttaaagacatacaccagatcccagctttcccaagactttttaatatgtaaaattgccaaatcaaagctttatacatactttaaatttaatatatactatctaatttttttcaaaaatgttatgttctggaactccagcacaccggtggctggtaagagtataaatctgtgtaatcgtgttcccaaactgtgactgtttcctgaagctgacccttttgtgcatactctagtgcagtgctcaccctaacagccacacacacatggatgctcaaagctgagcaaatgcatgcctctgaataaacgtccacaagtaaaaccatgatagtggaagtcagaaacgtttcccttgaagaacgagagatgatagcagtgggcacatggcagactctagatctgatgatgctcagtctgatcaacatgaagagaagtctgtttattgatgccactatcatcttttttgtgcctttagtcactgttaagtcatttgtcttaattaccaatttgtagttttagatctttcggactttccatctgctgcatgtcaaaatatggtgttttaaatgacaaattaaagcttcagaattaattaatattggctgtttagagagtattcccttgataataaaatgagctttaaaagagtcctttgttcttgagtagctactactgccatcatctcctttgtagggagaatagaatgtgtctcactaaccgggagtctctcctttggtgtggagccatataatggagatgctagtggaagatcttcttcattttatctttttctgacatctgttctcttcttgattagtctgctcttgggacatctttaaactatgtcagaattaattaattaattaattaattagttttctgctgttaccatgttactcctagtttctttgggcttttctgtatggcctttataaagggaaacatttaaaaattgaatagaacattgtttttggggggtttgtttggttggtttggtttggtttgttttgtttttctgagacagcatctcaggttgccttggcctcaaaatccactttgtagtcaaaactggtcttgggtgcctggtcctcctctgcctcccaacggttgtcattccaggtctagattaacatccgaggctaaataggatgttttatttgaagtaaaattacacatgaattttgtctgtttggttttataaaatagactttagaaaccagtatgacgcatgctattttctttactttttcaaccagtacccagttcctaagtgaccgctgaactaaatatcctgttgtagtaactcaactattgtgatgaagtctgcctttttatgcttttggttggaggtgctttattaaaatactgtgttttaaatatattatagactttctgtgttttgacattctcagtattattcagaagttgctcatgaatgtttattcttggtttttgttttaatatgcaatccatagacgctccgctgttgcccgcattcaggagttcttcaggaggagaaaagaaaggaaagaaatggaagagctggatactttgaacattaggaggccactagtaaagatggtttataagggccaccgcaactcccggacaatggtaccggctgctcgtggcattctttgatgagattgcagttcgtggtttgtctgtggtgattttgttacttctttattcaagcatgtttcttttagtctggtaatatattgcaagacaattctaccttactaaggaaatatatgtaagctagaaaaaattattttagcttagaaccagtggctgttgatttgtttgtttggttttttttttgtttgttttcttttatttatgtttgctgtcctcctttgggaatttaccattacattttttaaacttcattttacaacattttgttagtttggaaaataaatctgtacatgaaatccaggttgactataaaatacagatacattaattataacaccttttaaactaataactaaaacgtggctttgatcactctgtctctccttgctttcatttcttcatctttgaagtagccaggatagaccaggtgatcttgtagtgttcagaatccccaaatctgcatctcctgtgcaaggtaactaacgtaactattactctaaacagttcctatctagaaagtgttctctctggctgcagtgttcgctgcaaacctgcagattgtgttttacctctttttttcaaggaataggcaaaaataaactgaagtgaggaagtaaatagctcgccttgcacatgtcattggtagtaacaatttcatcatttttaaatggatactcatttttaacagaagtaaccaatttgtattttatgcattttgccaattaaacttttagataagagtaattgaaggcaagctgaggatctaaccaagtggctgagtgcttgcctaacatgcatgtgccctcagctgatttcttagcacaagagagatgcaagcatgagtacatgcacagcagcttttactgtgtgcattacacacgtgtggctgcagggcctccttccctgctggcttttgtgagcggcaggagtggccgaagcttcaggggaagtgattttaaaaaacactgtctgcagtataaagatcttagtatgctcctttcatgtttattaaatgggatagctattacatgtatcatatacatttgcttgcttgattaaagatatgtctttcttttcttaactctttgggcttctaccagttaatgaaaaaaatactttttgttcttggcaaacacaaaagacaacaattcctttattctatgaaatgttgttttctttataaagctgaaatggcatggtttttagaaagttcatctgtaagtatatacttttttccattatactgctttaagcccagaaattgcatttacttgtttagcatgtgtgaagtacctgttgtgtgacaaatcctgttgacattggctcttgatgcctttccaccatgttattgcccatggtgaagtactgtaatgattttaagattcttagaagaaacaggctttattatttctcttttttattttaaaaatcaatttattttcaatatgagaatagaatctgcttttcttttggtaactgtgacttggttatcctgcttcataaaatccctcagataaaagaagccaatttctggggtgctaactttgtaatgagcggttccgattgtggccatatcttcatctgggaccggcacactgctgagcatttgatgcttctggaagctgataatcatgtggtcaactgcctgcagccccatccgtttgacccaagtaagtaagatacctttcttaccgactgggaattgctgctgtcattcatcagctatggggaatattacagaagtctgaatgatcttactaagctctgctaaagatagtcatagctcgacatggacttaaaacaaagaatttatgaatgggagagtgttcacaaagccccacccctagctaagaagatactggcagttgatggctgcaggtaaaggaagagtccgtttcctcagggatgtgacttctggaagagcgtgtgcccatgctctgctggctggaaactcaagcatgtattggcagcactcactggattcagtggatttaatgagtacacaggtgggaggggaggcaggacgagagtctgtctgggaagagttggagagggaggagaggatggatttgatcagaacagtgtgtgcacgtctatggaattttcaaaggacaaagaaattttttttaaggttcccaacctcaaaaagaaagaaaagaatgtgcttttgacagatattctaaaaaaaaataagtttattcctctaatagttaagttttattgtctcagagtctggcatgactgagttactcatcgtgtattcaaaacaaacctccaagcctttttaagtcctcacaggtcagaattaatttgttagcctaaaatagagttggcttgttcgtgaagtggccatgtagctcataagaaaatagtgaataagacagaaatttgagtgacttcaaagtggccttaaatttttgttctacagttggttacttttaggaaacatttaaaattataactaacaattaattatataataaaaaagactggagagatagctcagcagttacaaacaattactactctttttttttgagacaggatttctctgtgtaacagaagactggatgtcctggactcaggactagctttgtagaccatactggtctcaaactcacagagatctgtctgcctctgccttctgagtgctgggattaaaggcactcactaaacatttactattcttgtaatgcactcaagctggttcccagcacccacattagacagctcacaaccaccagataatttaaagcaaatctttggccagttacagtgtcatacacctttaatcccagtactcaagaggcagagacaggaggatctctgtgattttcaggccagcctggtcttcattgtgagttccaggacacctaagactatgtagaaagatcctgtttcaaaaagtaaaacaaaacatcaaaagtatttatagtagttttcaaactaagttttgttaactttgcacctatgcttaatatttacatcttgaatttatgataaagatgtaaattttctttttagttctagcctcatctggcatagattatgacataaagatctggtcgccactagaagagtcaagaatttttaatcgaaaacttgctgatgaagtaagacttttactatgcttactattttaatttttacctaaaatgctattttaagggaaaaagtttattattaattgctaacataaaactaaggcatttggttaaggaagtcaaatctttaatctcagcactcataggcaggtgtgtgtctatgaattcaaggccagcgtgatggtctacatagcaagctgtaggccagccagggctacatatgagaccatgtctcagaaaaggatggggagggaaaagagatcaaatcttttgaaaaataaaaatgagataaataatactagaggtaaaaatcagattagtatcttactaattataacattgactttaataacacatcaggtatatctgaaagaaaaataagcttggctgccatgtttattatgtataacaaaaagtcatttaaagttttgtcttcgtaaaagtgttttagctgaaaacaaattgatgctgcagcctgtaatccaccttctaccaatcaggaagctgaagcaagaaattctggtcagactgagccacaaatcaagaccctgtcacaataagcaaaacaggaggggggcggcaggcagacagaggagggaaggggagggagaagaaaggaaaataatcttactgtatgttcctctccataactgtagacgtatttttgtattttgcattcttcacgtagggattaggatgccccttcagtgtgagtaggtagaggagcaaatgaacggatacctttcctttattgttgttttaaaactcccttagatctttgcttttactcgttttcattccatacaaaatactgggtctcagtgaaagggggtgagggtgggggtggtttcacattatcattgtgagccttaagcatcgaaccttaatcattcctactccctcctatatcacgagtcctgtctttccccaagacagtctcccttctgcttccttcttgtgtgcgtgtgtgtgtgtgtgtgtgtgtgtgtgtgtgtaaaattctgcatatgagaaaaaacatagctttccttgtgctttcgtatcatacatgtatatatctgtgtgtataaaattctgcatgtaagacaagacacaagtacatagtctctgcacttctgttaccatctctgacctttccctcccttttaccgttagacctcttcctccccgctcctactcacccttatgcatatgatatattcttcatggcagaaaaagcatgttgtgtttgtctttctgagtctgacttattttacataacatggtaatcttatttctacccattctcttgcataatctaacccttctttatgctcacttaaacttaactgaatatatgcaacgttttctttatctgtggctatctagactggttctgtagtttggcttttatgagtgctacagcaatgaacatgtattcatgagtatctctatgctatgctggctcagattcctctgggtaagcatgggagtggtacaactaagtcataccgtggtcctgtttgtagtgttctgggggaagcttcacactgagtccacaggcgctgtggactgctttattttcccaccagcaaaatctttttcttttgttgttttgttttgttttgttttgttttgttttttttcaagacagggtttctctgtgtagccttggctgtcctggaactcactttgtagaccaggctggccttgaactcagaaatccgcctgcctctgcctcccaagtgctgggataaaatcttttttcaccattcctttccagcatttcttgtcacttgttttcctgatgatagacattttaattgtggtgaggtgatatctcagtgtagatttagttgttgttgttgttttaagtcaggatcttactttgcagctccaggtggcctagaactggcagtgtagatcaggctgacctcaaacttgtctgtgcctgtgcaagtgctaggatgaaagctcacccggctcccactgcagtgatctccctgctggttgatgggattgaacactttctttctgtttattggccacttgtattttatttgagaactttctgtccagttattttctccatttattggttggacagtttggtttttgatatttatttttttctgctctctgttagatgcactgtgtacccagcttttctccctttctagactgtctctttactatgttaatggtgcagaagcctgttaagtggataaaatcctattggttcactgttggaattatttcttgagctattagaattcttttcataaagttcctctcgtgcttgtatcttgtggtgtttccccctaacactaacaggagtcttacattaatgatccatttgaattgaagttggggccgagttagagaggttctcattctatgtgggcagttcaagttttcccagcactattcgcttaaaaggctctctctctagtgtatggtttttgacacgaaagaaatctttcacttcctttttttaaagatttatttcttttatgtatataagtacaccttagctctatcttcacagcagaagagggcattggatcccattacagatggttgtgagagacaagtagttgctgggaattgaactcaggacctttggaagaacagtctgtactcttaaccactgaggcatctctccagcccaatatttcacttcttttggggggggggggttgtttgttttttgttttgtttggttggtttttttttttttttttttttttttttggttttttcgagacagggtttctctgtgtagccctggctgtcctggaactcactttgtagaccaggctggcctcaaactcagaaatctgactgcctctgcctcccaagtgctgggattaaaggcatgcgccaccactgcccagcccaatatttcactctgagtagatttattcatggctctcggacatctttatgtattttgatactattgtgaatgggattcttcccatttctttctcagaatgcttgttataggcaaactgctggttttctctcttgagttttgtatgttgttcctttgcttgagggacaaggaaggataaaagagactaaatatggttcaagtacaagatacgcttgaactaaataaggtaattatgaagcccatcattttaaagttcaacaaatgtaaattttttaaagaaatgctggtctctgatcttcttttaactgcaagtaattgtttgacattgaatagccttaaggtagaaatatagacattatacataaaaaataatgaaaaatatttctcttaagacttactgaattttgaaactgttttcataatctttagagcaaaggtgctattactgcatcacctttgacgtacttgttacctgctgtgtaggttataactcggaatgaactcatgctggaagagactcggaacaccatcaccgtcccagcctctttcatgttgaggatgttggcgtcactgaatcatatccgagctggtaagaacttctactctatcattaaaatcattattttatttgaaaacagtaagccctaccttagagatctatgtgattttcttaatgtccaaaaatgaaatcaacaactttagaactaggatttctttctgtgaacccttgacctaacactgtaaattatgtccttataaaactcgtttattggaaaatggtaaaatgcaagcacagtcgcttgagaactctgtcttaggtaatcttcctttacaggaagtacagtgcactgctgggtgggtgtagtggcactccctaaacacacgggaggtggagggaggagggaggaagagctgtccagagtcaccctaggctacataggaagttcaaggctagcctgagatacatgagtcctgcctccactaacaaaaacaatgaataaggttatgctgagtacactttaccatagatttatttaaaaaatcagtaaagccctagtgaaaagcaagcgttatgtggtaaggaaggaagttatgttagtgtacttttcaataatgtttttaagatttaattatttttattttatgtgtcttagttttccttcatgtgtatctggtactgtatgtatgcagtgcccacaggagcaagaagaaggtattggatcctctggaactgaagttacagactatggttactgggtgctgggaactgaagccaggttatataagtgatcttaattactgagccatctctccacctcttaatacattttttagatgataaactctggttcagtgacttggatctgaaaactatgtatcattacaactaatatttcagagtaaattgcataatctgtattcataacagtaaaagtgtgtattatgtatgcttatcacttctcactgacttcataagttcattcacgtgttgagtattatgcatcatttatagagtacttatattgtatcaaatattaactgttcacttatttatttagagggcttctctgtagtcctagttgtcctgcagtttgctctgtagaccaggctggcctcgattcacagagatcctcctgcctctgcctcctgagtactagtattaaagccatgtaccactgacacagcaaatactagccctttaaaaaaaaattaaagactttattttagatttattttattttattttatggtatggtatgagtgttttacctgcatgtacacatgcatgcctaacacaaagggggttcaaaagagaatgttggataccatagacctggagctacagttgtttgtgatccagtgtgtggtgatgggaactgaacctgggtcttctacaaaagcagcaagtctctccagtctctcaaatagtaaccctttaaattaggctttaataatttgcccaggccattacctgatgaacgttaaacctgacttgaaactacattccctttgactcagggtttcacgtacagccctgaggccagcccattactctgccatgctagccctagatgataaaccaaaaccttcctctcctcagagtttctatcattaaactgctccctcccatctggtgtttggtgtccttctgttgtggacatctttaagcctgatctattttaatatttttcacagtatttgggaaaatgcacttgtcaatatatgtcttaaatgctatccttactgtggcagtggctttctgccattgtcttcatacaccctggtgcgatacagcttatcttcatacctcacatccattccttcagtaaaccttactccagggtaaaactgtggcacagtgctttcttacttattgtgcccgaggctctaggttgaattcttcagtgctgcggaaaccaaccaaggacactaaacaccttcactgaacggtctgtataagccctgaagatagaaagatccaaaattatccaaaagctaatcgacaggttcacaagtagtgtaacctgggtcattgttgtaaggttcatcaaggagtttccagaaaatgtggaggaaggagctcatgaagaagttgggaaagtttagcaaaaagcttcatagttgtactgggcagaagcatggtctaatgaattatgcaaaaatgccccaagcaaaggaacagcaagtgcaaatgggataagcctaggagagcatgcatggtacagtggccaccaagtacatgacatatgtgtacacttgaatattgaaccagatagggcttaccttgagggaagaaactgcattcattttagtcaccattgttatctcagggttagccacttcctggaatgtagtagatactgaattttaagaaatcttacaaacagaagtacacaagcctcttacagatgtgtccatctggttacccacaggccatgtgccccaaaatagctgtgaatttagcccaatggaaaatcataatttcattgaaagtactgtttccagtgtaagagtttttttggggtttttttttttttggcaaagtttttgtttgttttatttttgcaacctgattgctctgttttggagcatgaactttgtaaatgacatcaagtcacagtgtcagaaggtgaacacatcagcattctctccaggcttctctctcttgcatccccttccaggtccccttagttaaaacttagcctccaagacaccttgtttgaaaaccactgcaagagaatgtaatatatcaaggtcttgtatgtttaaaattatatggtattgtatatactgtattatgttttcattcttcattaccttttgacgccaaattgaaagcttatattggggctggaggcatggctcagttaaagagtacgtgctgctctttcagaagactgacgttaggcagctcacagtcgcctgtatcaccagctccagggcttccagggcttccagcctcaacaggcacctgctctcatatacacatgcctactgggcatgggtgcacatacatagaatttaaaacattgaaaagaaaatcttaaaaaaaaaaaaacaaaaaacctttaagagccaggtttggtggtgtatgactttaatcctagctctagaaatgcaaggcaggtagatctctgtgaattagaggccagcctggtctacaaagccagccaaggctacatagtaagaccttgtttccgaaaaaacaaaaaccaaaccaagacttctgtatatactagtgagtagatttttacatacttaagttttgaattagaaatgttttttgtggttttaaatgaagttctaggggttatttatgataaatactaaaaggattttgagtgtgtatgattctcatgtctgttttccagaccgtctggagggtgacagatcagaaggttcaggtcaggagaatgaaaatgaggatgaagaataaagaactccttggcaagcacttagatgttctgagatttgtatacgacatttattatattttttttctttacagaactttagtgcaatttaaggctatgggttttttttttttttttttttttggagttcttccctattttggggataaccaaacattggtttggaatgagtgtgtgcatgagttgggagagtgtgtaaaacaaagtaagcaaaatgttttttgaaaccttttgccgtgtatggagtccaaaaaaaaaaaaaagcaaagtgcaatacttcctgaccctccgctgtgggagcttggatcaatgctgaagtcattttcattgtagtgaaaatgttggttcaaataaatttct

SEQ ID NO: 274 - DNA, 3052 bp, Mus Musculus
ctctcttcccctccccaccccccgcggtggtctcccctttcccaccccagcccctgcggagccatggctcggagtggctcctgcccgcacctgttgtgggacgtgaggaaaaggtcccttgggctggaggacccgtcccggctgaggagccgctacctgggaagaagagaatttatccaaagattaaaacttgaagcaactttaaatgtgcatgatggctgtgttaatacaatctgttggaatgacactggagaatatattttatctggctctgatgacactaaacttgtaattagtaatccatacagcagaaaggttttgacaaccatccgttcagggcatcgagcaaatatatttagtgcaaagtttttgccgtgcacagatgataagcagattgtgtcttgctctggagatggagtcatattttatactaacattgagcaagatgcagaaactaacagacagtgccaatttacgtgccattatggaactacttatgagattatgactgtaccaaacgacccttacacctttctgtcctgtggtgaagatggaactgttaggtggtttgacacacgcatcaaaaccagttgcacaaaagaagactgtaaagatgatattttaatcaactgtaggcgtgctgccacatctgtggctatttgtcccccagtaccatattaccttgctgtgggttgttctgacagctcagtacggatttatgatcggcgaatgctgggcacaagagctacagggaattatgcaggccgaggaactactggaatggttgctcgatttataccttctcatcttagtaacaaatcatgcagagtgacatcactgtgttacagtgaagatggtcaagagattcttgtcagttattcttcagactacatctatctttttgaccccaaagatgatactgcacgagaacttaaaactccttctgcagaggagaggcgagaagagttacgacagcctccagttaagcgcttgagacttcgtggtgattggtcagatactggtcccagagcacggccagaaagtgaacgagaacgagatggagagcaaagtcccaatgtgtcactgatgcagagaatgtctgatatgttatcaaggtggtttgaagaagcaagtgaagttgcacaaagcaacagaggaagaggaagacctcggcccagaggtggaacaaatcagccagatgtttcaactcttcctacggttccatcaagtcctaatttggaagtgtgtgaaactgcaatggatgtagacatgccagctgcacttcttcagccttctacatcctctacagatccagttcaggctcaggcagccacagccgccatagaaagccctcgttccagctcgttgctgtcttgcccagacagtgaaccgaggcagtctgttgaggcgtctggacaccatgcacatcatcagtcagataacagtaatgagaggctgagccccaaaccagggacaggtgaacccgttttaagtttgcactacagcacagaaggaacaactacaagcacaataaaactgaactttacagatgaatggagcagtacagcctcaagttccagaggaaatgggagccattgcaaatctgagggtcaggaagaatgcttggtccctccgagctctgtgcagccaccggaaggagacagtgaaacaagagctcctgaagaactatcagagaaaggaacacttccagaaaacctcactcaaaaccagatagatacagcacaacttgataacttcccagctgagccattggattctaactcaggagagaagaataacccaagtcaggacagcccttgtgggcttccagaagaaggcactttgtctgaaacagacagggagacttgtgagcaggccagcactgagagtgctaccaggcatgctagcaccaagcctgaactcccatcccagacagaagccattgagcaggccagcactgagagtgctaccaggcataccagtgccaatcctgaactcccatcccagacagaagccatagcacctttagctcatgaagacccatctgccagggactctgctctccaggacacagatgacagcgatgatgatccggtcttgatccctggtgcaagataccgaacaggacctggtgatagacgctccgctgttgcccgcattcaggagttcttcaggaggagaaaagaaaggaaagaaatggaagagctggatactttgaacattaggaggccactagtaaagatggtttataagggccaccgcaactcccggacaatgataaaagaagccaatttctggggtgctaactttgtaatgagcggttccgattgtggccatatcttcatctgggaccggcacactgctgagcatttgatgcttctggaagctgataatcatgtggtcaactgcctgcagccccatccgtttgacccaattctagcctcatctggcatagattatgacataaagatctggtcgccactagaagagtcaagaatttttaatcgaaaacttgctgatgaagttataactcggaatgaactcatgctggaagagactcggaacaccatcaccgtcccagcctctttcatgttgaggatgttggcgtcactgaatcatatccgagctgaccgtctggagggtgacagatcagaaggttcaggtcaggagaatgaaaatgaggatgaagaataaagaactccttggcaagcacttagatgttctgagatttgtatacgacatttattatattttttttctttacagaactttagtgcaatttaaggctatgggttttttttttttttttttttttggagttcttccctattttggggataaccaaacattggtttggaatgagtgtgtgcatgagttgggagagtgtgtaaaacaaagtaagcaaaatgttttttgaaaccttttgccgtgtatggagtccaaaaaaaaaaaaaagcaaagtgcaatacttcctgaccctccgctgtgggagcttggatcaatgctgaagtcattttcattgtagtgaaaatgttggttcaaataaatttct

SEQ ID NO: 275 - protein, 876 aa, Mus Musculus
MARSGSCPHLLWDVRKRSLGLEDPSRLRSRYLGRREFIQRLKLEATLNVHDGCVNTICWNDTGEYILSGSDDTKLVISNPYSRKVLTTIRSGHRANIFSAKFLPCTDDKQIVSCSGDGVIFYTNIEQDAETNRQCQFTCHYGTTYEIMTVPNDPYTFLSCGEDGTVRWFDTRIKTSCTKEDCKDDILINCRRAATSVAICPPVPYYLAVGCSDSSVRIYDRRMLGTRATGNYAGRGTTGMVARFIPSHLSNKSCRVTSLCYSEDGQEILVSYSSDYIYLFDPKDDTARELKTPSAEERREELRQPPVKRLRLRGDWSDTGPRARPESERERDGEQSPNVSLMQRMSDMLSRWFEEASEVAQSNRGRGRPRPRGGTNQPDVSTLPTVPSSPNLEVCETAMDVDMPAALLQPSTSSTDPVQAQAATAAIESPRSSSLLSCPDSEPRQSVEASGHHAHHQSDNSNERLSPKPGTGEPVLSLHYSTEGTTTSTIKLNFTDEWSSTASSSRGNGSHCKSEGQEECLVPPSSVQPPEGDSETRAPEELSEKGTLPENLTQNQIDTAQLDNFPAEPLDSNSGEKNNPSQDSPCGLPEEGTLSETDRETCEQASTESATRHASTKPELPSQTEAIEQASTESATRHTSANPELPSQTEAIAPLAHEDPSARDSALQDTDDSDDDPVLIPGARYRTGPGDRRSAVARIQEFFRRRKERKEMEELDTLNIRRPLVKMVYKGHRNSRTMIKEANFWGANFVMSGSDCGHIFIWDRHTAEHLMLLEADNHVVNCLQPHPFDPILASSGIDYDIKIWSPLEESRIFNRKLADEVITRNELMLEETRNTITVPASFMLRMLASLNHIRADRLEGDRSEGSGQENENEDEE

SEQ ID NO: 276 - DNA, 212235 bp, Homo Sapiens
  misc_feature (1)...(212235): n = A,T,C or G
gtgaccaccggtgctcacagcccctgtcacgtaccccctggcttactcaatcgatcacgaccctctcatgcggacccccttagagttgtgagcccttaaaagggacagaagttgagcatcagacgagctcggattttgagacgctagcctgccgattctcccagctgattaaagccactcccttcactatctcggtgtctgaggggttttgtctgcggctcatcctgctacatttcttggttccctgaccgggaagcaaggtgattaacagatggtcgaggcagctccttaggcggctttagcctgccctgtggaacatccctgctggggactccaaccagccagagtgacgcggatcctgagagctctcctgggtaggcatttgccccggtgggacacctcgccagagcagtgtgtggcaggcccccgtggaggatcaacagagtggctgaacaccgggaaggaattggcacttggagtccggacaactaaaacttggtaagactagtctttggaacttgcccactccatttgagtggaagcatggcctgatcacccacggcgtgcctttatcagcacttggttttggttttgacttggtttgaattacttgacaggactggtcttgggaacttgcccactccattcccactccatttgagtggaagcatggcctgatctgatcacccacggtgtgcctgttccggcactttggtttttgtttttgacttgacttagattgcttgatactttggttttggttttgacctggcttggatttctgaatactctgattttggttttgattttggtttagtgtaaactgcaaaagtgtgtgcgtgccctttttacccgttctttgttttgtggtgtgcatgtggtgtgagagtggtgttttgtctcgaagaaacatgggtcaggcacaaataagcccaccctactagaaactatgttgaaaaatttcaagaaaggatttaagggagattacggtgttactatgacactagaaaaacttagaactttgtgtaaaatagactggccaacattagaggtgggttggccatcagaaggaagcctagacaggtcccttgtttcaaatgtatggcacaaggtaacctgtaagccaaggcacacagaccagtttctgtacgtagacaattacagctggttttagacccccttcgcccccacagtagttaagagaggcagaaagagaggaagaaacagaggcaaaaggaaagtcaaagagagagagagggagagagagagacagaaagtcaaagagagaaagaaaaatagagagaaatatccaagtagttaagaaaaaaatagtgtaccctattccctttaaaagccaaggtaaatttaaaacctaaaattgataattaaaggtattctccgtaaccctgtaacactctaataccactttgttgttagtgtaaataagggcgtatcccgaaagcactgaggccttcctatcaaaaatccttaacccagtaacccacggatggcccagatgcattcaatctgtagcagcagctgctttgctaacaggaaaaaaaaaaaaaaagagctgtgggaaggcaaaatttatgtaaaaagagtgttatatggtaaattcttgtcttgaaataaattaactgttgtttaaagaaagaaatatttgtaataagtcagaaagttgagacatgtcaaagaattatctgcgaaagtcatagaaaacgatgttataaaaaatttatgcaaaaaatattgtataatttgaaagtaataaggcctcctgagtactattgaagaaacagtttatgtgcaaggtgcataagaaaagtaaaatatacttttggtaaaaagattagaaggaggcataagaatgtggatttttacctacattaaaaggttaaaaaaattattgttttgaaagtttaagcaagttttaaaatgttaattgtaaaaaaaaattctgtgtgtaaactaattagctaaagataaaaaggtatcatccagtttttctgtgaactggacattaaagtaaaaatgcaacaggtttttcttgaagcaccaacctgctctttaacaaaaattataaaaggttaaaaagagtctgtaaaaacttaccttatggtcaaacatgaaaaattggataaatatgtctatgaggttttattaaaattaagtttaacattaataacacactaatataaaggtaaaatttagcttatctggtataaaaatcatacaagaagtattattaaatataaaatggtgtttagctttctttggtctaaaaactaataaaaataggtcctaaaggaaacattcattttactagaggatcatagaagttaaagacttaaaacaaactttggcaattaagacagcataccaagatgcaaatgcctggttgaaatggatcaaatattccatctgcacattaaacaaaagcagttgttatgcttgtgcacatggcaggccagaggccctcattgtcccccttccactaaagtggtcctccagtccaccaggcgtgggctgcatggtagctcttttccaggattctacagcctggagtaataagtcatgccaaactctctctgctatccctgtgggtcagcccccgagggccatccagcctccgtctcccaacactaagttcacttcatgtctctcaccacagagaggaaacttaggattccttggagacctgaagtgatgcaatgagcttaagaattttcaagagcttatcaatcagtcagcccttgttcatccccaagcggatgtgtggtggtattgtggtggacctttactgggcactctgccgaataactggagtggcacttatactttagtccagttggctatccctttcaccctggcatttcatcaacaagagggaggaaaaataagacatcgtaaagcgagagaagcccccttataggtctttcgactctcacgtccatttagacgcaattggagtcccacgaggaataccagatcaatttaaagcttgaaatcaaatagctacaaaatttaagtcaatattttagtgagtgatgttaataaaaatgtaaattagataaattatatctattacaaacaacagcaacaagcttttcatgagttgaaagaaaaactcaggtcggccccagccctggggctacctgacctgacgaaagtgcacactctatgtgccaaaaaaaaaaaaaaaaaaaaagggccatctataccaattctaagttaatttagactaaacaaggtcttactcatagcaaaggataattgaaatcccaaacttacaaggttttcaacaaaagtaaagtttgctaaaagttaacagtgtaacatgtattatagtaacttctaatcttgtggccttagacagtctagtccacagatataaagaaagttcacttaaaaaaaaaaaaaaaagaatggttatcttcaaaaaaaaaaaatggcagttggagttttaacccagactgtagggctctggccaaggccagtggcctatctctcaaaacaactagatggggtttccaaaggctggcccccatatctaagggccctggcagcaacggccctgttagcacaagaagcagataagctaactcttaggcaaaacctaaacataaagtcccccccatgctgtggtgactttaatcagtaccaaaggacatcattagctaatgaatgctagactaactagataccaaagcttgctctgtgaaaatccccacataaccattgaagtttgcaacaccctaaaccccgccaccttgctcctggtatcagagagcccagttaaacataactgtgtagaagtgttggactcagtttattctagtgggcccaacctccaaaaccatccttaaacatcagtaaactgggagctgtacgtggatgggagcagcttcaccaacctctgcaaagtgactcagaaaaagccctgctccagtcacacccggaagctgactggtccacgcacggccgaagcatgagaaaactcatcacgggactcattttccttaaaatttggacttgtacagtaaggacttcaactgaccttcctcagactgagaactgttcccagtatatacatcaagtcactgaggtaggacaaaagattgctacagtcctattatttcatggttattataagtgtacgaggactctaaaagaaacttgtttgtataatgctattctatccaaggtatgtagcctaggaaataaccaacctgatgtgtgttatgacccattttaagcctccaatgatcacagttttttaaaataaattaaggactggtccttttctaggtgacacaagtaaagtaatagctaagacagaagaaagagggatccccaagcatgtaacactaaaatttaatgcttgtgccactatcaatagcaatcggcatagaataagatgcggttctttaaactgaaaaaaaaaaaagttacacagcaggaaataagtatatctgccacgaattaagctcatgtgcaaatgtgtgtaattactggtcttgtgtcatctaggctacttagaaaaaggatgaaaaagaccctgtttagctccaaaaaggagaaggcagcccctcctgtacgagtggaagctgcaaccccttgaaattagtaattacaaatcccttaaacccaaggtagaaaaaaagaagtacacgtatctctgggcgtcgataaaaaaggactagatcctagagtaaataccttagtaaaagaggaggttcgtaaactctctccggaaccagtatttcagactttctatgattaactaaatgtgccagtaccagagactccaggaaaaaccagaaatttgtttttgcaattagccgagcatgtagcccagtctctaaatgtcacctcatgttacgtttgtggagaaactgtaataagagatcaatggcataagaagcccgagaattagtgcctacagacccagttcctgatgaattcccggcccaaaagaatcaccctgatcatttctaggttctaaaagtctcaattattagacaatattgcatagctgaaaaaaggaaagaattcactcatcctgtaggatgacttagttgcctaggacaaaaactgtataatggtaccacaaaaacagttacatggtggagttcaaaccacacagataaaaatccattcagtaaatttccaaagttgcagaccgtttaagcccacccagaattccaccgggactagacagccccccactaggctatactggatacgtggacatagaacctacgctaagctgcctgaccagtggacaggtagttgtgttattggcactattaaaccatctttcttcctactgcccatacaaataggcgaactcctgggcttccctgtctatgctttccgcgaaaagcgaaacatagccatagataattaaaaagatgatgaatgaccacctaaaaaattatacaatactataggcctgccacttagacacaagatggctcatgggtataccagacccccatttacatgctcaactgaatcatacggttgcaagctgttttagaaatcatcactaataaaaccagtcaagccttgactattctggcccggcaagaaactcagataagaaatgctatctatcaaaatagattggctctcgactacttctagcagctgaaagagaggtctataaaaatttaaccttactaattactgtctacacatagataatcaaaggcaagtagttaaagacgtagttaaagacatagttaaaaacatgacaaaactggcacatatgcccgtacgagtgtagcacggattcgaccctgaagccatgtttagaaggtggttcccagcactaggaggatttaaaactcttatataggagttataatagtaatagaaacctgcttactgctcccttgcttgctgcctgtacttcttcaaatgataaaaagcttcattgctaccttagttcaccaaaatgcctcaacacaagtgtactatatgaatcactatcaatctattgcacaagaaggcataagtggcaaaaataagagtgagaactcccactaataaaaagtgagagtctcaaacgggggaaatgagggaagagagagaccctctcatattgttttatattgttttatactcagaaaaggacagagaagcgaaactaaaggcaggtagcccggcgcctaagaaccagacccgaaaccaggcctgggcctgcctgacctaagcctggtagttaaaattcgacccctgacctagcaactgttgttatctatagattccacacattgtatggaaggacattgtgaaatctctcgttctgttctgtttcactgtgaccaccagtgctcacagcccctgtcacgtaccccctggcttactcaatcgatcacgaccctctcatgcagacccccttagagttgtgagcccttaaaagggcagaagttgagcaccttgacgagctcggattttgagacgctagcctgccgattctcccagctgattaaagccactcccttcactatctcggtgtctgaggggttttgtctgcagctggtcctgctacactgtcagctagctggataaacttaagtgtttgttctgcagaccaaatctagccttgatctcaacatctatgccaattgttctcgatctgtctgaatattgggattacttaggaaactttaaataaccaagcccttcctggcattaaatcaggatatccatgggtcagcccagtttctctttttcttagctctatgtgtttattgttagttatctatttagcacaagggtcatggcatccaataattgtaggttatagataatttacataaggcaagttataggaaggagaggagcatcaaaataaatcaggattctatgggttcacacagaacaatcattccaagacactcacctgtgattcttaccttgggccaggtactcaattttcataagtatctggctttttccatatcctggtaatccctcatacattaagacttggctgctgttagatatcaaaaatttcttcatagtatacatgaagtagttgatctctttattacgtcctgttatttttagttttaaaaaagagcaaactcaatcaacgtaaaatagtctagagatataaaaagtcacatagaaaccctccttctaaaaatatccttgggccaggcgctgtggctcactcctgtaatcccagcactttgggaggccgaggtgggcggatctgctgaggtcaggagttcgtgaccagcctggccaacatgatgaaaccctgcctctactgaaaatacaaaaaaaaaaaaaaaaaaaaattagccagacttggtggcgggtgcctgtagtcccagctactcaggaggctgaggtaagagaattgcttgaacccaggaggcggaggttgcagcgagccgggatcctgccattgcactccagcctgggcgacaagcaaaactccatctaaaaaaaaaaaaaaaaacttggaatttccatggcattgttcacagactttcttcaagccttatgcactttcaaaattgtttaaatcttcctgggagctttttagctaaccatgtggttttgcagtttcatttgattagaagctgtgagagaaagtattcttataatcctcattataatgtttaattatagtgtagaaaactgagatttgcttagattacacaaccaggaattaagccaaggctatctaaccctaaagcttgtttttttttgttttttgttttttgtttttattcaacacactagaagtaatatgtagactattacattaggaaataaatttattaaagttagttttcctacattaaacaattatggataaaatatttttatttctgattctgtgataaaggaaatttgccctctgtaaatgaagattatacttaattcagggctacaaaaagcattaccagggataaaattcaatttgccttcagaaatcatgtacagattatttctatcataagagcaacttaaattcttagtgaaaatagattataggttttttctgattataaaactaacatatgcttgctgtagaaaatatggaaaacttggaaaagaaaaaaataaaaatcaccttgggttacaacccttatttttcttgtgtgtttttaaatactgtaacagccctgggtgaaatctgaaaccctgctgtaaggagctgtaagaattgtaatttctaagcagtgagcaatttctgtcaaaaaagttggagactcattgagagctaactattccttctgtgctgggcagatgaatgtggaggcccattttgttattcactgatagaacaaataaatatccaggtattatctaatgtctttgttgaaggaccattaattcaagtgtagacatttaataaaaagaagctaagtgctttgcttggtaatatacatttctgagtatggcttagtgagaactacttagcagactgtattgcttcttttgggtgaaatattccctttctgaaaatgcatttgaacctcaatttcgtgagatgttttgtgtttttctttggcctgaatgaagctcacataggaacttagaagatgaggcttcaaaggctgcatagctgcacaccaacatggcacatgtatacatatgtaacaaacctgcacgttgtgcattgtgtaccctagaacttaaagtataataataaaaaataaataaataaaaaataataaagtttccaggctgggagcggtggctcacgcctgtaatcccagcactttgggaggccgaggcgggtggatcccctgaggtcaggagttcgagaccagcctcaacatggagaaaccccgtctctattaaaaatacaaaattagccgggcgtggtggtgcatgcctgtaatcccagctactcaggaggctgaggcaggagaattgcttgaacctgggaggcggaggttacagtaagccgagatggcgccattgcactccagcctgggcaacaagagcaaaactccatctcaaaaaaaataaagtttcctaaggaagcttaaaaaaaaaaaaaagcctgcatagctgactcttccagctccctgtgttctattcatacagaacacctaccggtagaaccttatggagtatctttagctggattctaaaatgagattgtctccttaacttgaaatgcatgcaccttgtttctatctaagcaaagcctcaatatcggggactgttgtatgcagtttttaccctaaaaagccactatttatttattatagttttgttgtcaaccatgctgttgcaatttcatttatagcagcccttgtaaaagaagggcatttcccatgctgctagcctctgacaatctgtgtttggttatagcttgaaggaaaggtatgtggacctgatctttatgtcatactggtggaatcagtgcaaaagggcaactagatcagactgagaaatatacacataggctgcacgcagtggctcacgtctgtaatcccagcactttgggaggccaaggcgggcagatcacgagatcaggagttcaagaccagcctggccaatatggtgaaaccccgtctctactaaaaatacaaaaattagctgggtgtggtggtgtgcacctgtaatcccagctacttgggaagctgaggcagaagaatcgcttgaacccgggacgcagaggttgtagtgagctgagatcgcgccactgcactccagcctgggcgacagagtgagactctgtctcaaaagaaaaaaaaaagaaatatccacataatgtgttctaatgtgactgtcatgttgggtctgcaatcttgtagaaagaaggttaggattctgttgctgtcagttagtaaaataagtatatcctaggatgaaaagtaaggcctctgaggagggtgagagtgggtattccttctctctagcttcaggagttttggaatctggacttaaatgaagtgattggcttgaagaccctgaaaactacctgaaagcagtgaaagtgaggcatttctgctggcccaagtgtttttttgcagttctggaactgttgccctccttcaggctctgctgacaccaagattgtggcccaatatttctccaaagtgtgagacagagcctcctcttaattgccttgacacagttaggaccaagatttaacttatgataagacttttggggatgttcgtgtctgacagaaggaaattacaagtgctactagaagtggctgccttcagaatccacaggtcaatcttctttgggtctcttctcttataggtatatcccttcctcattttaggtctactcccctgtctaatctcgagttatctttcttacaataaggtccctatcaccaggaatcacaaaaatatcaattccaaatggattgtagacttaaatataaaaggtaaaaacaaaatttctgaaaaaaatgctagaaaaatatctccatgatttttgggtaaggaaaggtatctcaaatagtatacagaagcactaactataaaagacaggtaaatttgattacattaaagttaagaattctgtttattaaatgcataattgagagtaaaaaggcaaacacagagtgggaaaagtgatatacagtagaaacaaatgacaaaggacccatctctagaatgtgtaaataattccaaaagataatcaaaatataacccagttgaaaaataggtgaaaaattgtacaggtactttaaaaaaatgtctgggctgggcacagtggctcacgcctgtaatcccagcactttgggaggctggggcaagtggatcacttgaagttaggagatcaagaccagtctggccaacatggtgaaaccctgcctccactaaaatataaaaattagctgggcatggtggcggacacctgtaatcccagctactcaggaggctgagtcctgagaatcacttgaacccaggaggtagaggttgtagtgagccaagattgctcctttgtactccagcctgggcaacagagtgagactctgtctcaaaataaataaataaataaataaatccaaatggccaataaacttatgaagaaggagctcaaccacatcagggaaatacaaatggaaaccataataagataccactatacacccaacagaattattgaaaggataaagattgataaaactaagttgttgccaaagatgaagaacaactggaactctcttaacattctcagtcagaatataaataaatacaaccattttggaaaactatttggcataatcgaccaaattgcaccctttgtcccaacaatttcagtcctacgttttactcctaccttgtactcaacagaaatgcatacatgcattcaccaaaagacttgtgtaagaatgtttatggcaatattattcataagaaccaaaaactggaaataacccaaatgttgcacagcaacagaatgggtaaattgttgtatatttataaaaatggaatactacatagtaatgacatagaataaattacagctacacccaacaatatggatgaattatataacataccattgagtaagagaaagtatatataagccgtatataattatacaatgtatgattccatctgtatcaattttttaaacaggcataagtaatcgagggtgttagaagactttggggaaaggaagaaggaaagagtaatcctggtgtattgctatttttctatttcttaacctggatgatgattatattttcattttgtgataattcattaagctgcacagttatcattgatgtacttttctgcatgttttgttttagttcaataaagaagtttaaaatcaaggcctactacctacccagcaaagggtaatcctcctttctgttgcagatgaggcacgccataccaaacatgctgaagagaagaacaaaagaacagatgctagattcaaaacagggacatattgagagcaagagtgattagttcttagttcccagaaagtttccttctcaattgctaacaagagtctatcccctgactcaagggtcgcaaacgccaaaagaaggagaaacgagaaggtctgacttggtagtggagaatccaaagaactcaggtagcatctgtttccatagcatctggcacattgttcaataaatgcttgttgagtctgcactggtagagaaacccctttctggggagatcagacacctgatatacgacccagtagatttcaatgtggtgcagagtcacacatcctgcaaagattccaccaattgctcaaacaataatagcgcgccttttattggagcacatgctatgtgtctggcgcagttccaagtgctttacatgcatcattttctttaatcctgacaaaaacactgttaagaagtactacttggctgggcgcagtgactcacgcctgtaatcccagccctttgggaggccgaggtgggcagatcacgaggtcaggagatcgagaccatcctggctaacacggtgaaaccccatctctaccaaaaatacaaaaagaaattagccaggcatggtggcggttgcctgtagtcccagctactcagggggctgaggcaggagaatggtgtgaacccgggagggggagcttgcagtgagccgagatcgcaccactgcactccagcgtgggcagcagagccagactccatctcaaaaagaaaaaaaaggactactggccaggcacggtggctcatgcttgtaatcccagcattttgggaggccgaggcaggtggatcatctgaggtcaggagtttgagaccagcctgaccaacatggtgaaaacctgtctctactaaaaatacaaaaattagctgggcgtggtggcttgcgcctgccatcccagctactctggaggctgaggcaggagaatcgcttgaacccaagagacagaggttgcagtgagccaagatcacgccattgcattccatcctgggcaacaaaagcaaagctccatctcaaaaaaaaaaaaaaaaaagtactactcttatgttcattttgccagtgaggaaattcaggcacaaagagtttaattgcccaagaccccatagcaggtggtaacacaggatactgacagtatccaaacataggccagggtgcatatgtttgctcactccataacactatctcttgaagaagccttttagtcaaaatggattatgcccttctctgaactacaatactactttgttatgcctctcttatagcatatatcaaaggttcccatgtaacatacagctaagtttgtgtatgttggtcttccccacttgattgtgagttttctgggcaggaactaggccctgttcatactgtgtgtgtatttctccacttttatctgcagaggtggtacagaaaaatcatgaagagtacaggctttgggatcagatagtcctgggtttgcatagtaaactgattgcattaatggccccagtacctgtatctgtgccctttgctgtgtaacttggcagagtcctctcattctggactcagccttgtgaatgcttttgtcaatggactatctgcaaacataagacataggaagaggcttgaaaaatgcttttgcattgggcctgctctcttgctcctccagtattgccaggacaaacatgctggatggaagatgagacacatagagccagattgccctagttatcccaactgaggccgccaggttggccaacagtctgttgaaccccaggcacgtgaataagccaagacaagatcaaccaaatccagccaagatcaattgaaccccacatttgtgagaaaaataaatgtttatttttgcacaccactgaagttttgtgattgcccgtaaggtcacattattgtgactgaatcttgactccattgctcactatagatatggccatagacaagtcatttaacatctctgagcctcagtttttgaatttataaaatggaaattataatagtttctatctcgtatggtcaatattaagactggattatatattttgaggtaaagtacctgatgtttaataagtactcactaaaaattattattcattcatgtattcaaactgcactttattgatggcctatgtatgccaagcacagtgctaagcctcaggaatactgaagggaataataaagacaccttgacccaactgcagccctggttctgttatctgactcttgaagacctcgattccagcttgctaatctaatgaataacaactttctgctctctgtgccattcatttattcatcattattgaggacctactgtataccaagcactggggatataagaataaagaaataattagtatcttcaaagagttcacagtgtaacaagtgaaaactgtaggaagtgaataattgtgatatagggcaaggagtgttctaatagaagcatatgctataggaggaaaaaaggaagaggaagaaggaagacaaagggggaaagagcttaactgtctagctgggatggggaattcatagaggaatgtctatgaatccctcgagctgggtttcaaaaattgactgcggttttcccaatagaccaggattaggtgggtgctgatgaggacaatctacttaaacaacccagaggagggggaacaggaggagatgaggttggaaaggcaggtggtaccttgtatgtcactgcaaagattttgaacatcaccatgaaaatgactgaaagccattgaaggattttaagcttcaaagtgacacccataaatctatgctgagcttttggggaatgtatttcactaaagacttagaggagaaataatatcttatactcttttaaccctaacaatgcctcggcatacagttgacataattagtaaataatattaaatggttggtgattgggcccatttgggtgcaaatagatactcaaatgagaggattttttgtttggtttgtacaacctttgaagaattaccctcatattctcagatctgaggagagaatgggattttccaccatgccatagtgtcagtcagatggaggaaagattaaggattttgaagtctgggccttggtctggggaaagcatagatttcaacttcttgaactggctccaaatcttaaatgggtgactgctttgctatcataattctcccgcttctttactaaaatatacttcaaaattaatgctccacactcacactttctcagtacggccccaatactgatacaatggtccagaatctgcaacacctttcataactttctttggaagctctttaaaaaagtacgctggtaggttgctcccattgtaggtgacagagtcgcaggtcacaattcctgggtagtacatcatcatcctggcagctaagttgactttttgaccaatgactatagcaagaaagagaaagtcaaagatcagggaaataacaggcattgaactgaatgtaatctgaaacattgtccccaaatagcatttttaccctttactccctttgctgttcatgagtgacacagaagcctagtctcaagacccatattcagccaatggctattcacaaaatgtgcagggagttagttagccattagcaaagtttctgcctcacttgggaggtcaagagaatgacctgctcagggatggaaggggcttgagtatggagcaggctctgtaagtgggatggccacagcactgaaggctctcagagaaggtgtcagttggtcttctgccacaaggtggacaagcacatgcttgggcctggggtactgatctccatatgagacataaaattgtgtctgcatgctcctatgaataaaccttcatttggcgatttctcgatttagtaaatgggctagaagaggcgtgcatggaggattgaagcacaggctctgaaggcagactgtgcagggttgaacaccagctctacccctaactatgtgcaaactacttgggacaattactttaaataactcctcatgcctccattctctaacctataaaatagggatgataatagtaactctctgagagggtggtttatgaagattaattagttaatacacgtttatcactttcaacagcagctggctgcttgtaagccttcaattaatattactacaaatgaggtagcaaatgtgtcactttaacataaacttgaatacttctgaacaaggtactctttttgaaaactatttattgtggagaaatttgaccataaaataaaatataatgaatttccatatacccatcaccccatcccaacaagccattagcccatggctaatcctgccccatcctcacccccatacactccccaccctgtgtacttttgaagaacatctcagacattgtatcatttcagacataactatcgtggtattttacatatattcagtattttagatgcattattgctgaaaatcttaaaccctgataggatggaaaagggaagtaatagagttgtgaaatctggagataagatttacttattactactctcttttgagagtgtcattatttttcagtaatatcaacattcataatttttaaggagttctagcttattccaggaattaagagaagtaactatttaatgttaacaggaaagtattacaggagcccctcattccatcaacatatagcctcccactgctcccctctcatgactacatatttctctactcatacatagccccagaaatgcacactctgcaagcattgagggctccatggcttggctccatctggaagactctaaagtttctgagggcagggctcatgtctcactcatttttgtgcttcctcccgcaaagcccagtggcaaggtgctgtgtttgcagaaagaaagctggagatgagctgacccagcacacctgtgtactcgtgtctcacagtgtgtccaacgatcccacagaagacaatcccactggcaacaccgatggatacagttctggtgcaggggagacaagatttgtggggaaagaaataaagataatgagcgtagagaaagtgggaagggtgggaaataatgtctgggttgggaaagggtgggaaaggattttctctacccgttggaattagtttatggcatttctacatggcccggagatgcgaaggaggaacaacagtttgagacacaggactaagttcttaattaattcttctttctttcctgttccctgcatgccctccctacttatgcctcaaaagggtcagggaccgctgggtgggaccagggtcaatactcactggattttgtggacttgagagcagaagtcaaatatatccatagcacattccagagcatgagtgagctcgtcaggtaccttttccccagggaagccaaagacacagaggaaagagcagccctgtgagggagagagacagcaaccacagctgatggacagtgtgctttaaactggactggccagaaggctcaacagagagccggcggcaatttttggcttctgaatcagattttatcatgatttctctcacagtattttatttttagtacacttcaaacacttctactgcatcatcaacaggagggcttgagccttgagaagggcttgttttgctccagatatagtgaatagggctgagctatctgtgtgcatgcttcggcctactctctcctgtggccaaggtccatgctgcaaagtgctcagtttaagtctatgaagcagcagcacagagcagtggaaaaggcaccagctctggaatcagaaagtctctgtcctcaagccacttctcaagtgtggaaacttagataagtctattacaatctaggaacttccgtttatctctctgaaaatggatatactgtagacctgctgagatgtttttggctactaaaagaattaatgtgttatatatattcaaaaagtcatcctaaactataaagtactttgcagatactgttattcttagggataaaggcttaggctgtaagtaggttttcttatcataaagctaactgttccatgcaatgattcaactctaaaacttggcatttgtagtattagtcacttaaaaaatgacctcagtcaggtgctgttgtctgtaagaaaagggcattgtgaataaagggtgatgggttgaaattttgagtttttgacatgttacatcctgataaaatgcaaagaacactaaaatacctcaatttcttcaaccctctccaaaagaatttgatcaactgttagatcttaaaaaggactgggatctgccttgacatgaagggggaaacactgcttctaggtacgtgcaaagagggcaacccctttgggggaagcagggagcttttgcctgcaaatttatgtagcggcctggcaagagcttttgattccccctagcaatggaatgacagctctcatttattgcacactgactctaagataggcattacaccaagtgcctcacacatattacattatttaaaactttccacaatcatttgagacaaatactatccccattcaaagaggaataaaccaaggctcagagaagttcaatgacttgctaagtctcacagctgggaatctttggagccatgtctgcaagacacgaaagactgttctcttagattctacactcttttcttatgatacccatgggtcagtattgaagaaggtactggagacaccaggctggaagtaatccctttccagaactcccatagcacagagttagttcgtctcatatagaatgcatgcttcctgcctggttgtgtcaatatatgtgttactcatctctgctgcccagccctagcttttcgtcttctatgaaatgctcagtaaatgcttgttgaattagtgagtgagtggatgtggggcagtaattaagtgctctgcttttaatacacaaaaggaattgagatgggaaatcaattctcacatatgcatctgtggtcatttgttcatcacatcacttttctctgaattgattaagaacagagtgaagaccaggtgcagtggctcatgcctgtaatcccagcactttgggaggccgaggcaggtggatcacttgaggtcaggaattcgagacccacctggccaacatggcgaaacctcatctctactaaaaatacaaaaattagccaggtgtggtggcgcatgcctgtaatcccagctactcaggaggctgagtcaagagaatcgcttgaacccgggaggcggaggtttcagtgagccgagatcatgccactgcattccagcctgggcaatagagcaagattccgtctcaaaaaaaaaaaaaaaaaaaagaacagagcgaaaacacctgggagccagaggcagtcccctccctgccatggatgaaaataaaaggggaactggaggtgttgacatggcaagtgggctttcttggaaacaagcttctggggtaagatggttactaaagactcctgacctgaaacccctgggtaatacatcatgcactgagctggagacttatgtgtagtgagaggtagcccagcgtagtgagaggtagcccagcatagtgagctcagacggggatggcagactgcctgggtttgaatcccagcctcccccttactagcttgatgatcataagcaaaacgtaatctcgccttgtcctggtatcctaatctgtgtttcagcatcctcatctatataatgaggataatgacaagagcaacctactgctcagagtggtcatgaggatgaaatgagtcaatagagatcaggtcctgagaacagtgcctggcacatagtaagtgccatatccaccatagaagttataattataaacaaagactggccttctaggttaaatttctttttttgtttagttgagacggagtctcacgctatagcccaggctggagcgcagtggtgcgatctcggctcactgcaacctccgcctctcaggttcaagccattgtcctgcctcagcctcctgagtagctgagattacaggcacgtgccaccgcacccagctaatttttgcatttttagtagagacagggtttcactatgttggccagtctggtcttgaactcctgacctcaagtgatccgcccacctctgcctcccaaagagctgggattacaggcgtgagccaccacgcccagcctctaggttaaatttcctgtgtctattctcaccaatgtgcttgtccatgaatgctaacctaaaactattggtaggttcccatcccatagttcacacttaccttgtcaaacatgaagactttattgatttggccttggaagatcttcaggacagaagtgatgtgcatataggcatcctggatggctgggcctatctcttctgctttgtcttggtcttcaaacatcaggttcacaaacacaatcgtcactgggcgaagctcagataaatagccctgaagctgtttgttatcaatctgcaaagtagagagcagctttctgtaggtgtccttggcagtggatccctcccccaacaccgcccccacctcatacccgaaatcatctagggaatgtctacctcagaatgggtgaggtacaacatgacagagccagcatgcctgaagtggagcagatggaaatataatcaaaatccctctcttccagtggggacttatgcatgtgctaatttttggccagcaaccactccattaccccaactgctggcttcctcatgccaatatgagccattgcaataagggaaataactactgttctttttggctctcctatttttaaaaaaatttaaaattttttaatttttgtaggtctatagtagatgtatatatttttgtgttacatgagatattttgatacaggcatgcaatgcgtaataatcacatcagggtaaatggattattcatcccctcaagcatttatcctttgtgttacaaacaatccaattatactcttttagttatttttaaaatgtatggttgtattagtccgttctcccactgttataaagaactacctgatactgggtaatttacaaggaaaagaggtttaattgactcacagttccatgggctgtacaggaagcatggctggggaggactcaaacttataatatggcagaagacgaaggagaagcaggcacttcttatatggccagaggagagcagggggagtgctacacacttttaaacaatcagatcccatgagaactcattcactatcacgagaacagcaagggtataatccacccctatgatccaatcacctcctaccagtcccctccaccaacattggggattataattcaacatgagatttgggaggggatacaaatccaaaccatatcaatgattaaattattttttactatagttaccctgttgtactagcaaatactaggtctttctcattctttctctttttttgtactcattgaccacccccaattcctcctcatcccccactacccttcccagcctttggtaaccatccttatattctctacccccatgagttcaatcattttaatttttttttttttttttttttgagacggagtctcgctctgttgctcaggctggagtgcagtggcgcgatctcggctcactgcaacctctgcctcctgggttcaagcgattctcctgcctcagcttccagagtagctgggattgcaggcatgcaccaccatgcctggctaatttttgtatttttagtagagacggggtttcactgtgttagtcagactggtctcgaactcctgacctcatgatctgcctgccttggcctcccaaagtgctgggattacaggcatgagccaccatgcccagcccaatagttttaatttttagctcccacaaataagtgagaacatgtggtttctctttctatacctggtttatttcacttaatataatgacctccacttccatccacgttgttgcaaatgacagatctcattttttttatggctgaatagtacttcgttgtgtatatgtaccacattttctttatccatttctctgttgatggacacttaagctgcttccaagtcttgactactgtgaatagcactgcagtaaacatgggagtgtaggtatctcttcaatatattgatttcttttcttttgagtatgtatctaggagtagaatttctagattgtatggtagctctatttttagctttttgaggaactttcaaactgttctccaaggtggctgtgctaatttactttctcattaacagtgtacaaggattcccttttttccacatcctgtccagcgtttgttattgcctgtcttttggataaaagtcattttaactggggtaagatgataatcttattgtagttttgattttcatttatctgatgattggtgatgttgtgcaccttttcacatatttttcacatacttgtttgccatttgtatgtcttcctttgagaaatgtctatttcgatcttttttttttgagacggagtctcactctgtcacctgggctggagtgcagtggcacatctcatctcactgcaacctccgcctcctgggttcaagtgattctgttgcctcagcccctgagtagctgggattacaggcgcccaccactacgcccagctaattttttgtatttttagtagagacggggtttcaccatgttggccaggctggtcttgaactcctgatctcgtgacttgcccacctcggcctcccaaagtgctgggattacagctgtgagccactgcgcctggccttattcagaccttttacccattttttaatcagattattagatttttttctatagagctgttacagcttcttatatagggatgtgaaggacctcttcaaggagaactacaaaccactgctcaacgaagtaaaagaggacacaaacaaatggaagaacattccatgctcatggataggaaaaatcaatatcatgaaaatggccatactgctcaaggtaatttatagattccatgccatccccatcaagctaccaatgactttcttcacagaattggaaaaatctactttaaagttcatatggaaccaaaaaagagcctgcattgtcaagataatcctaagcaaaaagaacaaagctggaggcatcatgctacctgacttcaaactatactacaaggctacagtaaccaaaacagcatggtactggtaccaaaacagaaatatagaccaatggaatggaacagatccctcagaaataataccacacatctacaaccatctgatctttgacaaacctgaaaaagacaagaaatagggaaaggattccctatttaataaatggtgctgggaaaactggctagccatatgtagaaagctgaaactggatcccttccttccaccttatacaaaaattaattcaagatggattaaagacttaaatgttagacctaaaaccataaaaaccctagaagaaacctaggcaataccattcagtacataggcatgggcaaggacttcatgactgaaacaccaaaagcaatggcaacaaaaaccaaaattgacaaacaggatccaattaaactaaagagcttctgaacagcaaaagaaatcatcagagtgaacaggcatcctacagaatgggagaaaatttttacaatctacccatctgacaaagggctaatatccagaatctacaaagaacttaaacaaatttgcaagaaaaaaatcaaacaaccccatcaaaaagtgggcaaaggatatgaacagacacttctcaaaagaagacatttatgcagccaacagacagatgaaaaaatgttcatcatcactggccatcagagacatgcaaatcaaaaccacaatgagataccatctcacaccagttagaatggcaatcattaaaaagtcaggaaacaacaggtgctggagaggatgtggagaaataggaacacttttacactgttggtgggactgtaaactagttcaaccattgtggaagacagtgtggcgattcctcaaggatctagaactagaaataccatttgacccagccatcccattactgggtatgtacccaaaggattataaatcatgctgctataaagacacatgcacatgtatgtttattgtggcactattcacaatagcaaagacctggaaccaacccaaatgtccatcagtggtagactggattaagaaaatgtggcatgtatacacagtggaatattatgcacccataaaaaggatgagttcacgtcctttgtagggacatggatgaagttggaaaccatcattctgagcaaactatcacaaggatagaaaaccaaacaccacatgttctcactcataggtgggaattgaacaatgagaacacttagacacagggtggggaacatcacacaccagggcctgtcgtgggctggggggaagggggagggatagcattaggagatatacctaatgtaaaagatgagttaatgggtgcagcataccaacatgggacatgtatacataacgtaacaaacctgcacattgtgcacatgtaccctagaacttaaaagtataataaaaataaataaataaatataaaaataaaagattaaaaaaactcatcaatgaaactaattttttatctgataaaataattctaaaaaaaaaaaacacttgatgttatcccatctgtccatttttgctttggttgcctgtgcttgtggggtattactcaagaaatctttgcccactccaatgtccttgagagtctccccaatgttttcttgtagtagtttcatggtttgatgtctcaaagtccattttgacttgatttttgtatatagcaagagataggagtctagtttcattcatctgcatatggatatccagttttcccagcacaatttattgaagggattgtcttttcctttatattcttggctcttttgtcaaaaattagttcactgtagatgtatgagtttatttcttgtttctctattctgttccactggtctatgtgtctgttttcatgccagtactatgctatttgggttgctatagctgtggtataatttgaagtcagataatatgattcctcctgatttattctttttgcttcagatagctttggctactctgggtcttttgtggttccatgtaaattttagaattttttttttctatttctgtgaagaatgtcattggtattttgttaggtattgcattgaatctgtagattgctttgggtagtatgaacattcttccaatctataagcatggaatatctttcattttttttttgtggcctcttcaacttcttgtgtcaacattttatagttttcacggtagagatctttcacttctttggttaattactaggtactttattttatttttagctattgttaacaggattactttcttgatttctttttcagattgttccctgttagcatatagaaatgctgatttttgggccgggcgcggtggctcacgcctgtaatcccagcactttgggaggccgaggcgggcggatcacgaggtcaggagatcgagaccatcctggctaacacggtgaaacctcgtctctattaaaaacacaaaaaattagcggggcgtggtggcgggcgcctgtggtcccagctactcaggaggctgaggcaggagaatagagtgaacccgggaggcggagcgtgcagtgagccgagacagcgcaactgcagtccagcctgggcgaaagagggagactccgtctcaaaaaaaaaaaaaaagaaaaagaaagaaaaagaaatgctgatttttgtatgatgattttgtatactgtgaccttgttgaatttgtgtatcagttctaatggttttttggtggagtctttaggtttttccaaatataataagatcatctgaaaacaaggataatttgacttcttcctttccaatttgtatgccatttctttctttctcttgtctgattacataggacttccagtattatgttgaaaaacagtggtaaagtgggcatccttgtgttctagatcttagaggaagggcttttagtttctccctattcattatgatactagtggtcggtctattctatatggcttttcttatgttgaggtatgttccttctatacacagttttttgggaatttttatcatgaagggatgttgaattttatcaactgctttttcagcatcaactgaaatgataatatggtttttgtccttcattctgtagataagacatatcacagtgtttgatttgcatatgtccaaccacccttgcatccctgggataaatcccacttgatcatgatggatgatctttttaatatgttgttgaacccagtttgctagtattttgctgaggatttttacatcaatattcatcagagatactggcctgtagctttctttttttgatgtacttttgtctggttttggtatcagggtaatactggccttgtagaatgagtttggaagtattccctcctcttctatgtttcagagtagtttgagtacggttggtattagttcttcaagtctttggtagaattcagcagtgaatacttcgggtcccagatcttgttacttgttatttatctgttcaggttttagatttcttcagggtccaatattggtaggatgtatgtgtataggagtttatacatttcttctagattttccaatttattggcatataattgctcatagtagccaccaatgatcctttgaatttctgtattatcagttgtaatgtctcctctttcatttctgattttatttatttgggtcttttctcttctgttcttagttaacatggctgaaagtttctaaattctttctctgtgttatcttgaatttctttgagtttcctcaaacagcttttttgaattacctgtctgaaaggtcacatatctctgtctctccaccctggtgccttatttagttcctttggtgaggtcatgttttcctggatggtcttgatacttgtggaagttcgtcagtgtctggacattgaagagttaggtatttattgtagtctttgacatttaggactgtttgtacctgccctccttgggaaggctttccatatattcaaaaaaacttgggtgttgtgatctaagccatatctatattacagagcaccgcaagtgcagtaatgctatggttcttgcagacttatagaggtaccacctttgtggtcttaaataagatccagaagaattctctggattaccaagcagagacttttgttctcttcccttactttctcccaaacaaatggagtctctatttctctgtgctgagctgcttggagctgggggtggggtcacacaagcacccttgtggctaccatcactgagactgcactgggtcagacctgaagctagcacagcactggatattgcccaaggcccactgtgactactaccaggctaccacctatttttgttcaaggctctagcactctacaatcagcaggtggcaaagccagccaggtttgtgtctttcccttcagggtgatgagttcctccaggccccaggcaggtccacagatgccatctgggagtttggctctcttatttttatagttagggataagaatagcatgctatgtaattcaaacttccattttcattaggtatcttctggaatgttttcacattctgtcctactctacgttcaaacaaaatgaaatcagtattattatccccattttaccgattagataactgatgtatggagaagtaacacagctttcccaaggtcacataaggacacaataaactagaatccaaatctccagactcctcatccaacatttatttatttatttagttagttagttattttttgagacagagtctcgctctgtcacccaggctggagtgcagtggcgcaatctcggctcactgcaacctccgcctcctgggttcaagcgattctcctgtctcagcctcctgagtagctgggattacaggtgtgtgccaccgcgcctggctaatttttgtatttttagtagagacaaggtttcaccatgttggtcaggctggtcttgaactcctgacctggtgatccacccacctcggcctcccaaagtgctgggattacaggcgtgagccatcacgcttggctcatctaacatttaatctgccacactctcctgcctctctggggtggtggtatatttcatttagttcccctcttctctccaacacaacaggcacagggaaaataaaggagagtgttgggtcgggcgcagtggctcacatctgtaatcccagcactttgggaggctgaggcgggaagatcacgaggtcaggagatcgagaccatcctggctaacacggtgaaaccctgtctctactaaaaatacaaaaacgtagccgggcgtggtggcgggcgcctgtagtcccagctactcaggaggctgaggcaggagaatggcatgaacccgggaggcggagcttgcagtgagccaagattgcgccactgcactccagcctgggcgacagaatgagactctgtctcaaaaaaaaaaaaaaaagaaagaaaggagagtgttcccaaattatccctgccaatcatcatccctgaattttgttaattaaatacatagcaaatcaatgggggaaaatcactgcactttctccccgaaatagcacagaagtgtcagattcttcaacgacaatgtgaaacacattttctagattaaagaaggaattggtatagggaataatgcagccatgcttcctaattgcctagaaggtcctggtttcatgtaattttattctttttataaaagagatttaataatttctaattaaccaatgtgctaatttttttcttttcttttttttttttttagagacagggtcttgctctgtccccaaggctggagtgcagtggcaccatctcggctcactgcaagctccgtctccttgctcaagtgatcctctcacctcagcctccctagtagctggggctacaggcacgtgccaccacacccaactaatttttgtatttttgtggagatggggttttgccatgttgtccaggctggtcttgaactcctgggctcaagtgatccacctgtctgggcctcccaaagtgctgggattacaggcatgagcctggccttgatttttcaaataaaatcattcacaaataaataaaaaacttctgtcagactatgtattctgagttttggcttggaaaagaggactacggtatctttaaggacttctcttctttgggttcagggtctggttttggtaaagttgtaaaaggttgtctttggtcttattttcaaccctcttagctgtacctcttcaccaggtaaacatttttcctacctggaattttcccagtgactcacagagtccatcttatattccattgctaaagaccttgttttcaactggttgcaattaaagaagcataatgtattatatctcttgagaatggctgggggagaatggggtgacttttttaagcttcaaaagccatgaagagtcaagcaatgcaggcactaggggtaatgtttttacaatgggctgaaggtggcagggtgcattctgatacctctccaattcactctatgaaggcagctacccactggacaggcctttgttacaaagatttcctccaggacacaacagcattttgatgggactaagtattaaagcaggcatatattaggagggtggatagcctgtgcaaaaattgtagaagtcagatagaccagggtccaaatcctagctatatcttttacttgacaacctcaggaaaggctgtagtgttctctgggtctcagttttctcatgcatataaaatgaggataaaaatatctaccaaggactgtaaagaataaatacatgaactagcagagtgactggcatatggtgagtgataagagatagttataattcacatggaataataaatttgagagaaccaagattaagagaataaaaagagaaaatattggagggtggaggtagctcagagtattctaattacctgcattgttaaatctcaaaacttaagagctaatgcaaatgacttggagaaatagtgtaccaatgttcatccacttgaagtctttctgctatgtggcatatagaaagggtgcccgcatgttcttatatgcttgcaacagctcccatttgcgcaattatataaggcaacgcagtcctattttatgcctgttgtcatattataattatgaataatgatctctttgaaagtattgagatttgaacaatgaatttcacagtcacctacatatagagaatgtctttttaggctcagtgtggtggctcatgcccataatcccagcactgtgggagggtgaggcgggcagatttcttgaggtcaggaatttgagaccagtcaggccaacatggtgaagctccatctctactaaaaatacaaaaagttagctgggtgtggtggcgcatgtgggaggctgaggcaggagaattgcttgaacccgggaggcggaggttgcagtgagccaagatcatgctgctgcacttcagcctgggtgacagagtgagactctgtctcaaaaaaaaaaaaaaaaaaaaaaaggaagtctttttattttaatggaacattttactatttactagtagctgctgttttttttttcttaaatcttaaaattccagctgtccagatccctgacatccccaaagccagtaaattcaattttgaaaatacctgcttcaaaatgctttccatcacatacttttgtagggacatctccagttcaggatcaggcttcagcgtgcatgcaagcctcaggaggtctaagaaggcagaaggagggtgcaggctcagagagggaagtttggctctgcagtgctagtgagaggaggctcccagtccctattctcttgggcagtgggccttcttgtccttacagttgtcaggagactctgggacacctaggggctgaaagggccaggggaaatccaaagaggagctcttagaggttaaaggtttcccaaaattcagtcacatgtagctcaaaaccttgttcaaactgacatgacgctttgggacttagggagattttcacttctgaacttggtttagaactattgccacaggagatgggaacaaacaaatgagggaatgacaagagaggagcatggtgacagaatgaaggggatggtagagttgaaagggcagcaggaataacattaagaagactggtttctgatctcaggcttgataccgcttcactgtgtgaccctggagaagtcactttgctgccctggttgcctcctatttcctcacctgggaaaagagtagttgagcttcatgatctctatggttcccttcactataaagattgatagttttatgctctaggatagactgataagagatggtaggaatgagtttgagggagtcaaaaaataagggagacagaaatggcaaagggttttcagcagggaagaaaatgataatgtgaaaaaaaatgtgtgtgtgtgtgtgtgtttaatttggctggtcctgatttgtagcctttataataaaaccataactgtaagtgtagcactttgctgagttctgtgagtcatttcagtgaattactgaacctgagggcattaaggagatccccagatttgtaggtagttggtcagaagtgccggtggtctggggatcccagagcttgcagctagtgtctgaagtttgtagaggattcaaccaatgaaatcctgcactaactccaggtggttataacatcagaattgcactgcaggccgagcacggtggctcacacctgtaatcccagcactttgggaggccaaggcaggcggatcatgaggtcaagagatggagaccatcctggccaacatgggaaaccctgtctctactaaaaatacaaaaattagctgggtgtggtggcacgcctctgtattcccagctactcaggaggctgaggcaggagaatcgcttgaacccgggaggcagaggttgcagtgagcccatatcgcgccagtgcactccaacctggtggcagagtgagactccatctcaaaaaaaaaaaaaaaaaggaattgcattgcagtattatggtgctcaaagtaaggcctgaagaaaccctttatagaaggtaccattaagacccaggagatggcattagtaaagctcaaggagtgggtaatgtcatgaggctttctccttcatctctggagcttctgaggttcttggcctttcctgatcaatgtttgtacagtctccccactccccaccccactgcctattgtggctttgtaaaagtacagtcttctatttgtaacatctaaaatactccagacctgtacataaatgatgagaaagaatgattcaaagatgtttctgatgtttctcacttggatggagttttcagggaagggtaagtagctaaagttcagatacgttaatattagatgcctatttgacatccagtggaagtcgcccataggtagggtattttgtttgttttttatgaattcaggacaaaaatctgtcctagaattcaggacaaaagactgaagcgaattctggctgttaggtctgagactcgggtgatgtaagcaacttgcaggaccttgagagtgagtgtctgcttaagttttgtgatacagtcttctcacttgcctcatcttactcatatggaagttaagcacgaataaatggttcactaagaagtgagtagagaagactagaaggtcaaagacagatacctgaagtcaccaacatttaagacatggaaaggaaactaagcaaagaggactgaaaataggtgatttgagacgtaaaggcaaaactagaaaagaataatacttttgaactcaaggaaaaaggagaaggtagtgtccaagaaaagagcataagctatggtcaaccatctaggatgaggcctgagaagaggtcacctggtttggcaaattaatggtccttggtggccttgacataaacagtctcagtagacagcaggggactagcgtagaagctaggtgtcagcggtgcaagactgaagagcaggtgagcacagacatcaaggtgcttgcaatcaatatttattggatgaataaataaataaggggacatgagagcaggtataaatacatttacagattacttttcctagaagtttattggtgaaggttaggaggggaaagcagcacggaaagaagctttactttttcttttatcctaggggatacttattaatgtttgatggatgagggaaaggagtcagtgcctagggagaggtggatggtgtggggagtgtcatacttagaattgctgtcccggagaatgggaagtaggtcccctttgtgtgctggtaaggaccaggagctgtgttgaggagcccacccaccagtaatgaagctgtcggcattgatataagaccctactgaccactggtagaggcaaaggcatttttccatggtgggtacttacttttgtgctcaccagaaggataataatgcatgaaggtcgtacactttgtgaaaaattcatcaaaattaaaattggggggtggttttaagaagttaacctaaataaaagcaaatgagaagttttcagttattctgagaactgtttaatcctttgaagtgtaatttcttagcagaaagagagtatgcttttgactgaacagtgattggcacacttaaacaccaagactatttgatttgtaaaattgaaattttaaattgaaaatctaaaaaatctttccaattacagtgttcactcacatctcaatgtttggtatatgtacagagagggtcattccaagggggactaatcttatacttttctgcccttagaactttttcctgctttttttccttcataacattttaattcaaataaaacctggttaaactgcacaccatttcttccttataagtgttaaaggacgggggctgatggccaaaaaggaattaggagcatcaccagtcataagacatcaagatcatgagacacatgtgatgacacactgaggatggcacgatctcatttttgtggtattcttggttaaaaaaaaaaaaaagcataaacttggtccaataaagagaaaacatcaggcctgtaatcctagcactttgggaggctgaggtgggcagattgcttgagctcaggagttcgagaccagcctgggtaacaatggtgaaatcctgtctctaccaaaaatacaaaaaaaaaaaaaaattagccaggtgtagtggcacatgtctgtggtcccagttactcaggaggctgtggtgggagaatcgcttgagactgggagttagaggttgaagtgagctgagatcatgccacctcactccccactgggtgacagagtaagattccatctcaaaaaaaaatatatatatatgtatatatatatagagagagagagagatatgttgttggagatgcagaagagatgagagaaagcatcaggcagtgctaaccagagatgtgtgtgacaacatcggctggcaactctcttgtgtcacggtcactgcaagacaacggaaccactgaagtgctgttgcagactgcaggagactacatcaaaaatatcaacaaggccgggcgccaggggctcacgcctgtaatcccagcactttgggaggccgaggcgggcggatcaggaggacaggagatcgagaccatcccggctaaaacggtgaaaccccgtctctactaaaaatacaaaaaattagccgggcgtactggcgggcgcctgtagtcccagctacttgggaggctgaggcaggggaatggcgtaaacccgggaggcggagcttgcagtgagccgagatcgcgccactgcactccaagcctggggcgacagagagagactctgtctcaaaaaaaaaaaaaaaaaaaaaaaaaaaatcaacaaaatgcaatgtgagatcatgcatacagtcctggaacattccactaagtggaccacagtgggaaaactggtgacattcaaataaggtctttaactagtgcatagtattgtaccaatgttaatttcctggttttgactattgcagtcttgttatgaaagatgttaacattaggggaaggtaggtgagggatatatggaaactctgtattattttttcaacttttctgtaagtctaacatgaattcaaagttaaaacaatttttaaaggtatcaagaatgattgaagagaggctgggcgtggtggcttacacctataatcccagcactttgggaggctgaggtgggtggatcacgaagtcaggagttcaagaccagcctggccaagatggtgaaaccccgtctctactaaaaatacaaaaaattagctgggcgtggtagcgggcacctgtaattccagcgactcggaaggttgaggcagggaattgcttgaacccgggaggcggaggttgcagtgagccgagatcacgccattgcactctagcctggtcaacagagcgagactccgttttttttttttaaaaaaagaatgattgaagagcatgggaatgggctattgctataagccagctaggccatgcaggctggatatgtcttgctggaagagtgaggagtgggtggtggtggtgagggttgtaggctgatgcatgagtgtgggagtgcctcctatcttgaccagcatctgcacggattctctgtcttttctttctttctgccgcgtagtcccattcctttggctcatctagcagcacacctttcttccactttcataccctcaaagcacagcttttttaattgtccatatcccagggacagttctgcttatagtcaatctgcaacttaaccacaatgttttctactaggcagagccacaggaagagaagtctctcttctatcactgaacttcgccgcacttgctcaactccaacctttaccttcagtgatccctcatcctgggttaggagggtgttgggtaaagaaagtgagggtcaatgacagcctttaaaactattcccctctgctcctggatgaaccggcagacccttctggttccttaagcaaggtcgctagcccctcaaaaggcctcaatccccaaattccatatcctcagttacccataaagaagcctaatcatttcctcctcaagctcaccagcctgggctcctcccagaggagctgccctggactaaagcctctgtagcctaacccagactgaccccatcccaatctccagcccaggagctttatgaaaccagcgtgcccagtgactcttctggcagggggcctctgttacaggctggcagaactttctgtaagtagcagcatcacacccaccttaactgctctctgatctggaacactctcaatttcaatcatgctccggtcacagagctgccagcagtttggtgacagaataacatcattcatctgagccatgttctgggcaaggcgcacatcgtccactgcctgaccaatcaccagaaagtggctgtgtgtttcatctccaaagaccaacatgctgatgtggccagcagccagtcctggcaagaaggcaaggaataggtttgcacaagaagttctggattatttcccagcagcacaggtttttggaaaaaccataatcttggtgggactatactatctcagagcaaaatctcacttctaaaactttacataggaattatggcatacctcttttgggctcgggccttccaaagctccccttcttccaaagctagaaagttctaccactaaattttgcctgtctgtaacattatctcactacatggtcctaccagtccccaaagttatttttaccttttcttcaattatgtatacttaagggcaacagggaatacctttaataattcttattttgggagaatttgcattttagcagagattgaagctgtaactaaaaataatcccttagggttgaattttagacaacaaagggtgggggaaaggaagtatgcatttgacagttacacatcccatcccaacaaccatttctctcattgcttttaagttggtaaatgaaagttttggaacctaagtgacagaagaagatattgtataatatgacatgtacacaaaatatatgtataaatgaactgtaagtgacacacatttctttcaaatgactgtaatacaatcaatgtttattttttatcttcgctctctgctatactgatttgtcagggctgactcccccctgattctacatacagtttgttttctatctgaaacacactgatgtttggacttactctaaaaaaaggtgctgggacccacctcactaacagccaatcagcatgcaagagggggctgggttcccatcattctcaagaaggataacacatcagactccttgggtactaacttagaaaaaatattcagtattataataactttgatttttttttcaacaaaatatttaacttatttgggcttttttttttgagatggagtttcacgcttgttgcccaggctggagtgcaatggcgccatctcggctcactgcaacctccgcctcctgggttcaagcaattctcctgcctcagcctcccaagtagctgagattacaggcacccgccatcacgcctggctaatttttgtattttagtagagacggggtttcaccatgttggtcaggctggtctcaaactcctgacctcaggtgatccacccaccttggcctcccaaagtgctgggattacaggtgtgagccactgcacctggccttatttggaaatttttaacaacatcaaaagcgggcctaggttaaagaaggctgagaaacagttaattgtataactgctgatgatcctatcaggtatgacatgtgagaattctaagttttgcaaagtttagttaggcggaagctaacaccaacagcaccaaccataactctgttactcattacttatacctctcagaatctcatttttcatctatgaaatggatacaatgatgcctgtatctcaggactgtcatatagtgtgcgtaatgtttgcacgtgcatagtgtgtaatgtctgcaatgtaataaggaaatatgtgtgactattactatattatatgtataactttaagaagccttgtgtaaagctggagctgtgttgcaggctgacctgttaagcttttcctacacctcattcttatgaggtagggggtgaccagtctcatgtcgttgctgaaactatgtaatggcaagctagtctctattttgttttatactgcacaaccttgacaagcagcaagatggaataataataacagcagtagcagtcataaagactattttattgggtggttcctatgcattaactaccataccaactaatttactttttgtaatagcttattaggtagatattatgattaacccaaattctctcaactggtatgtgaggaagccaaaattcacattctgattgtcctgatgccaaagttcagggcatcatggggctgagccaccatgttctactacttctctttgggagagagagatgccccaggagtcaagaccctatcccagctgccgtaggatttattccttctcaaatgcttacctatcttgactcggatgtctaggccttcttcccactcctgggtctcaaacaatccatggatctccaggctacatttaattaccactgtgataatgtttttcagctgctttcgctccaccctccacagggctagcagtgcatcaccttcagagagagacatgccgcgggcttttgacctgccctggggatcaatctattttgtatgagatctgtatagaaacttactcatcaagcattcctcagcctatctcctggccactcccttctctaggatgcctcctttgtccccaacacagaagcacaggcacctcagcactcctttcttaccccttctatcttagtaagcccccatacctgcaaatttcaggatgtctcctccaaaaatcaacacttctgagaaaaaaaaaaaaaattaaatcaaaccctgattccttaaaggtagtaaaaaaacatcattctttcttagtggaatagaaactaggtcaaaagaacagtgattcagagaataggcttatactaaagatctcatcccagacaagccacttaacccatttgagtctgtttcctcaagtggagaatgagtacgtggaaccagtttacatctatgctccatttctgtgaatggggaaagacaggagaaaggcagctagggtttctgatgaggtctgaagacagctgccctcctcccacgataatggaatgcttttaattaatttattgatcaatatatgttataggctggggcttgtgtaagcatgggtgggtggatgaatgacaggactccacaaaaactaggagtcagggaatgggaaaatcacaaccatagtcacttgcatttttggttattaccaactttgtattttgtttatttagacggtatggcataaatggccattctctcttttagttacgcatcatcatggattggttaagcacctgttgtgccaagtcagatgcagaaaggaatcaaccatagttcctgcttttatgaagcattaaattttgtctagtgggtaacatcaagatattactaaggaactcagagtctgataaaacactaggccaggagttcaccataacagagtaaaccgttgtcttcatgaatagtttgaattaacaatgcaaacaagatggcaggcagaggttgacaaggggactaaagttttcagttcactctaagtgcttcagcatccatcattaggagacaaattattgagaagctaattataaatcatttatctactcatacaacaatctcttaatgactatctttgggttttatagatgctggcttttaaaaatacttggataggccaggcatggtggcttacgcctataatcccagcactttgggaggctgaggtgggaggatcacctgaggtcaggagttagagaccagcctggccaacatggtaaaaccctatctctactgaaaaaaatacaaaattgctgggcatggtggcgcacgcctgtaaccccagctacgtgtgtggctgaggcaggagaatcgcttgaacctgggaggcagaggctgcagtgagctgagatcgtgccactgcactccagcctgggagacagagtgagactctgactcaaaaaaaaaaattaataaataaaaatagccgggcaccctggctctcacctgtaatcccagcactttggggggctgaggcaggtggatcacttgaggtcaggagtttgagaccagcctggccaacatggtgagaccccatctctactaaaaatacaacaattagacaggtgtgggggcgggcgcctgtaatcctagctactcgggaggctgagacatgagaattgcttgaacccaggaggcgaaggttgcagtgagccaagattgtgccactgcactccagcctgggcgacagagcaagactctgtctctaaataaataaataaaaataaatataaatacttggatatataactaaaagtattactactacagttcttttaaaagcagtgtataattcagccctctaacacaaaacatcccttccctcaaatagtctgtattagtgaggtttgattatatttatttcttcagttatactatatcatatttcaaaaaagactggttttatacacatttcatggggaagaggaggagtgctaagcaattgtactctatcaggttataattgacaactacggaaaaaacaatgaattgaaatattctcaagccagaaacctatgggaacacttactctccactattgcacttatgtggtagttgaggatctccaccaactgctcagcccctctgtccatgtacatggcactgctgaacttctcagtcattgcagtaaaacctggaataaatgtgcagctggtttccttggctgcttgggggaatcaaacagagccagaagaggactaccctggaaggcagcgggcctcagctttttttttttttttttttttttgagacagagtcttgctttgtagcccaggctggagggcaatggtgtgatctcagctcactgcaacctccgcctcccgggttcaagcaattctcctgcctcagccttccgagcagctgggactataagcgtgcgccaccatgccaggctcgtttttgtatttttagtacagatggggtttcaccatgttagccaggatggtctcgaactcctgaccttgtgatccgccctcctcggcctccaaaagtgttgggattgcaggcgtgagccaccgaacccggcggcctcagcttttaaaaacaggcagagtttcttcttaaggatctttgtggctggtcaagtgtcagacatgcagcctcctctagctattattttaggggtcaggaaaaggctccagatatttctttcttccaaattctcaactgtacagtgataactgcaacttctttaactgggaataaaattttcattccgtggtaacaaaaacacacacatttcaaacacttctgaagaggtggcaagtttattagtaagatgtaaacatcatctagggagatcatttcctgaggtcaattttgactgggatgtgtatggggcttggggctggagaggatgagtcagtgaagttggggcagagatactggagcaaagaatgggacttgagcatgttaaagatatgcctatgactggcagtcctgagtaagggaggatgagagagagccagggccacaagctatttcctccctcttgtgttctcagtggagcacatctgctgtgacagcccaagggctccagaatggcctccctactctgcaatcaagctctgcatgtgaattcccacgcgagcctgttgctcatccacattaaacaaacatcccttttgcacttgcctgaaatatcaacaaacatcaggactccgtcaaaataatccataaagggtcgctctggggagaaatgtccatagacaatgaggtctggtaaatgagctgctattctgactatgggccagtcctggaattcttcttttggagtgttcatgttcaagacaaatgttcaggattttatggtgacaggaagcagtctccaaataggtcttctaaaaagaaaattgaaatagaggaaatctgatatattcatttgctcattttcctattgctctttctccatttgttttgttctaacctgcggcctgcttatagtggtgaaaatgccagagttgttgagccacacttcaaaagggccaatttctatacagaggaagaaccctcccaccctgaacagctgttgcataagtgagctccattacaaagaggctggggtgaaagagggtagctgaacggctcaactcatttgcaggaaggggtaggccctcgcagggcaagtccagttgtagtgggctgttaagctctattcactcaggccagacttctttttcttctgtcctcatgtttccttttaccctctctctaccttggtcttttacttttttctctctttaaaaaaaaaaaaagtgtagatgtgattcgtgtgtgtgagtgtatttatatgtaagtgagtattagagttttgtatataggcaagagattaagactataaaggtataatgttaaataaatggaagaaaagagttcagaaatgtgtgtgtgtgtgtgtgtgtgtggcagctggaaagatggaagaccttaagctgtaaatggaaggaaatgctgaaatttcaatttgttgcccagttagttctgagaaaactaggatttcctaaggccttcctgtagctgctggggcagattaaatgctcatgcctaaatgttgtaaaaatcatgctctaccagcctgaacagtaaaagcaaacaccctttactttttcagagcaatccaagttactggaataggttatacagaaaatataagaggatttgtttttttaagaaaaggaactgttatttttggtttaattctgaccagcagagaggaacttgttagtaggtcatattgggatatattagagtattagaggaaaaaattgagacagtcgcttatatcccttagatttaaggggaagtatttaaaaaataactcagggaaaaatatttgtacatttaacagacaaactttaaaatgtatatagtatacatttaaaaatgtatttagtattctaaaaaatgagtgctaaatgttacatattggataacctttaaaaggaaaagtcctggcaaactcaaatgttaagaagtgaacaaaagaaagaaacatataactaaggtttaaaaaaaaaaagggtagcattaaaaatgcagcaaaagaccacagcatgtgccaggaacagtcaatagataaaattaaatcaaataaataacttcagatagtaaatttggtgctatatgaacttttaagaagggtgtgagatgctagatgcagtggtttgtgcctataatcccagcactttgggaggcctacacaggagtattgcttgagcccgagttcgagaccagcttgggcaacatagtgaaatcccatctctacaaaaaaaaaaaaaaaattgctgggtgtggtggcatgcacctgtagtcccagctattcaggaggctgaggtgggaggatggcttgagcccaggaggtcaaggctgcaaggagctgagatcgtgtcactgcactctatcctaggtgacagagtgagactccatctctaaaataataataatgataataaaaagaaaggtacaagaaaattgaatgtcgagaatgaaagacttacaaaaaatgctaaagttaagaaaacctagagggatttttaaaggctttgttgaaaacaaggtaattaataaaagaggaataaggatgaagcttaagtatggtgtaccatacaccttttcttttgtttctaccttctccaccatggaggattgaaaagtataacaagcattgctaagaaagaattgaaatccaagataagtagtgctaaagcacacagtcattttaaataaattctagctagtcccagacaacatatatctacagatactgaaagaactgacaggtgtaatgtcagtaatctcaaaaaaccatggagaacaagagatgggctggaataccatagatgggcacattctcttttgaatttcaaaagatgaggctactcatggatcccagaaaacacagaccagtaaacataatgtatttgttgagataatacaggttatgtttcattatcaaataactttgaaatctcaatggcttgaaataacaaaggcttatttcttgttcatttcttgctcatactacatgtcccttgtgggttgtatggggttctcctctgtttttgccttcactttgggacccaaactggaatattctggttgtcaaggtagtgggaaagaggatgtagtggagtatactcattctactcccagaagtgacgtatttcacttttactcatggcattgaccaaagcaaattacatgaccatgcctagtttcaagtagacagggaagtgcactcctaccatgtgcacaataggaaagagagttggaatatttgggagcagcctcaatggttatttagattagcaagaggtgattaaaaggagtcaaatggattcagagccaagagcaagccaacattatttcctattttggaagagttattaaacttttaaatcaagagactgctatagacaatgtatatattgactttaaggcatttggccaaatttctcatatccttgtgagtaaaatatacaaaattataggaataaagaaaatataattggctggttagcaatcacacctaatggaaattgattagtattctggtgtcaactcagaggtaagcctccatgggcacgatagaagactttgataaagatataattgaaagtacggccattatggaaaataatatgcaggttcctaaaaaattaaaaatagaactaccatatgatctaacaatcccacatctgggtatatacccaaaggaattgaaatcagtatccctgcactcccatgtttatttcagcactattcacaatagccaagatatggaaccaacctaattgttcatcaacatatgaatggataaagaaaacattggataatgtatacaatggagtactattcagccgtaaaacagaaggaaattctttcttgtatgatagtgtggatgaacctggagggccttatgttaagtgaaataagccggccacagaaagacaaaaatattgaacgatctcacttatatatggaatctaaaaaagtcaaaatcatagaagcagagtagaatggtgatgcctgaggctggggttgggtgggtggaatgagatgttggtggctgaaggatacaaagtttcaattagacccaatgaaaaagtcctggagatctaacctagagcaaggtgaatacagttaataaagtattatatacttcaaaatggctaagagagtagatcttaactgttctcaccacacaaaaatgttaagtatgtgagatgatacgttaattaccttgatttaattatttcataatgtatacatatattaaaacatcacattgtacaccataaatatgtacactttttgtcatttttgccttaataaagctgagggaaaataaaatttgaaaatatagtgagagaactaatgcactgatgacagagctaggattttaatacatcttaatcaaccaaaataatgaaatttcaaaagaataagtgcaaagtgctgtgtttagagtttttaacaaaatcaaatgcataagcacgaggtgctaaaaaactagatttactgcaaattagtgctatcttttaaaaaacttttattgaagcataacatacatgtaggaaaatgtacaaatcataagtgtatagcttgaattactctaaggtgagcaaatccgtgtaatacccattcatagcaagaaggaaaacattaccagctttccagaagtttttctcatgccaccttcaagtcactacccttctcttttccctgaaggtaacctttcttatttctaacaacatagatcacctttgccagttttcaaactttatataaatgaaatcatactacatattttgtgtttgtgatattcatccatgttgttgtatatcaataattgttcattttcaatgctatatagtattccatcacctgatggaatataccacaaaacatttatccactatactattgacctgtgggttgttcccacttttagaccattatgaataatggtgctaagaacattcttattcatgtgttttggtgaaaagatgtatgcatttctcctgggtatatacacaggagtggaattgctgggtcatagggtatacacatgttaaactttagtacaggcttgtccaagctatgtcctgtgggccacatgcggtccaggatggctttgaatgcagcccaacacaaatttgtaaactttcttaaaacattatgagatttttttgtgatttttttttcttagctcatcagctatcattattgttagtattattttatgtgtggcccaagatgattcttcctcttccaattgtgccccagggaagccgaaagattggatacccctgcttgagtagatcttgctaaacagctttccaaagtgatggtaccaacttacactccctcaggcaaggtatgacagttcagttgctacatatctcagccaacacttattttgtcaggcttttcaacttttagtcatcttgctaggtaagtggtggtgaggagacaggccatttctcttactgtctcttgtctctgaagagaaagaggaagtaaaagctgaaaaacacaggaatgaagtcagtggcaagaccagccggcgccactgatgaccaggtctgaggttaaaagattaacccccattctaaccacatgtgctatctacagatctcaatctattatgaccctttcacgtggaacccctcacagctctaagcccttaaaagggccaggaactgtttctttggggacctcagttcttgagatgcaagtctgccaatgctcccagccgaataaagcctcttccttctttaacccgggtgtctaaggggttttgtctgtggctcgtcctgctacaatggtatctgtggttttgtgtttccttgttggtactaaggagattaagcaccttttcatatgttaactagctatttggatgcaatgcaattttaagatacataaaagtgttcaaatctaatccagaggactgaagttcattgacctctttaaaattcattgactctggaatgtgaggaatgatggcagagactggaaataagtcagaaaattatgacattttggttaaaattgtagttgtcttcaaatatttgggctgaactgtgaaagttgtggggtaagtggtggacgtgggctaagtgggggacatgggtgtgtatgcaaggtgtaatgtgggaccctgcaatcaaagaacaacttccctaccttctccttgaggtagaaatttggtttgggttagcaagattaaagttcatgggaagtatgcagtgggaaaggaaagttggtgtgtttttcttcagtggagggagctagttatcaaagaataagtgactgtaaacagtatgttccgtaggcatgggtgctctgaagtggcttccacagatgtgctgagtagccagagaactaagataggactgagcagaactgagcagggcgtagctctattcttccctctcctgcccccagttcactggctcaactttgacttctttagctaccaagcttgtaagattgaaagactgagctaatgaaaacagaggatgctcagttaaatctgaattttaaataaacaattttttagtataaatatattccaaacattgcattctttctagcagccctactatcagccccttcaatcttggcaataccacactctcctcacatgcatagtatagactgttttgctaaagttgttaacactggatggaaagtgggttaggtttattctttgttgctcaggatcaactaggatcaatgactggcaatcaccgaaggacaaatataaacaatgtaagaatgagtgttcaaactgggcagttttaggaagtgttgaatagctatctacctgtgagggtagaggtataaaaagtaaagtagaggttcctcttcaaagactttcctccccgtctaattaggaataaatagtaacttatcttaaaagcaaaatttattcaaagacctgtgctaacattcttaaatatctgctagccataataaagaaatcaatgtactttatgttcttggctcccacaatgtagcctaaatatttgccctggcatgcttatactggtccaagcaaccattaggtcatagcctgttcctcttccttatttaaaagtatttttacttttctcagcattccacaagttacttcctccttcttttgttctcctctacctttgcctcttttaaaagttctaagttgctagccgatcgggacaaatacagaatgtgaggtcctgttccggccaatgggcagtagggtgaacgtgtcaggttataaatgaccccgtctcctttgttcagtgtactctcgtggcaaaactgctggcgagtataccctctctgcaggaagtaaaaatgcccttactaaataaatttatgttcaagtgctatttctttatggcattggagaacaagcgtttcaaacagaggtgattttagtcagtgtagagatgaattagatgattgttaagattctattgttttaattaaggtgatgtgaatgaacttggacagatttttctgtttatgatgaccaaacaaggaaagtacatgcattttgagattaagatggcatatgtagatgtgaaactaaaagaagaaaatgataggtttaaaaggcagggagatctaaaataaatatctgggagtttcttatgaacacccataaaagacaatagaaattttctatttttgaagatatagttttctgctttaagttctgcaacatcacaaaatgattagtgatagctgtatttacctttctacaggcacataccacattgtaattataatttattatgacctttttatgtgaagcattctattgtaggagttattaagaaattattttaggcagatagagaggaaaaggggtccttgggaaattttcattttttaaagcatctccagaaaatttcttgtaaagccttggctcttagagccaggccggcaacctttgataagcaaatgaaggccattagaaacagggcccacccaacatggcgattccggaggccttctttcccttgccccacatgttcctggcaacatggccacctccacatactcccacgtgtgtagaacatcatggcaccctgcatttgcatattaaaaggctagggtgagagggctagctttttcaagggctttgtgaatgacatgcctggtcaaaccaatcccctgaaccctatgcaaatcagacactgcctcctccagcgtctgtaatatatacctagctgacgtccaccccactgggggttccctctctcggctttggagcccccctccctctgtctctgtatgggggagcttcttccctctttcctcttccttcttgcctattaaactctccgatccttaaaatcactccacatgtgtctgtgtcgttttatctaaaccgggatgaggactaagaaccttggtgttcctccactcatcggagccgtatcaattctacataggttgcctcatttaatcatccaaacagcgctatgaagtagacctgatttctatagatatgaaaactgaagcacagaggtattaacttgctctgggttataaagctggaatatccaggtctgtgggacttgaaagtccctgttgtttctactatatcatgctatatcccatttgtatacgctttatagcactttggggatgtatatgacctagacaaaagatgtaggtttaatttaagagcactttcaatgcatgttgatggtacccttatcaactgttcagccaattctatcacatcaagaatacagcatgaacagcatgggtactgacaaagcgcggaagcaccttggaatgagaaatgaggatacctgagtcaaaaggcaagcaggcgaatgaggcccgaaagataaaccaagaaggattcctgaatgcggagtgtgagtaaagaaaactcagtagtacccaaaaatgaaaagagaaattagggttcgattatattcatcagtttctctaaatctctcctctagaatttcctaatagattttatattcaacttttcacctacatgtaaagtcaggtttcacgagtccaaagagggagatactctgaacttaaaggcacagtgttacctgtcatgaaagcttgcttgcctactctagccatggtaatttttcttctgagctattgtggctcttaatgtctacacttaagtggcttatttcccatacaaatatccttgattatcttttgaattgcttctattttgtcttcatctgaattgtaagctccccgtttggaaccatcttctacatatctttgtttactccacagcaccttgccagagcccccttcaagaggtaggcacttggtagttgttgactgataaaaaggaggatatcacgtgagaaactgcagaaaagaggcaaataaagaaagtaagctagaaagacagagcatccaggttgagaaggtgaggcaatatttaagccttcaagcttctaagctcatgtaagggactgacacagaggtatacacaaacttgaaccctgacttctagccccaggcttcccactcctctgcaatagctgtcttctttcctgacggtcgccctcatcttcagctctgcaatcaatctttctgctgagactcttacttccacatacctccacttcatccagggctgaggaaaagccagacctcagttagggactaggtcttttaagactgcagaagacaggagaggaggccgggtgacattattctgaagacagctgaagcgccatgtctgtctatagctgacccataaaatgacagttttgtctaaaagccgttttccaggccacaccctcatcagtagctcattgttccacgggcaccgaccatgtttctgattgggtggcactgccgtcccctcccccaccaacctgagtggcctactactgtacaaggaaggactggctgtttcaggttctcttatccgcacatttgaggcaagggtcaggggagactgacatgaccccagagtagtttacacaattcttcccttggccatgtggaggatggttgaaattaggcaatagttggtaggtgatcatcagaagtatctccagagcaagcaaacacctaattttagtcaatagtggttacagcttgtaccaggactatgaaatttaccagttataataaattcaatacttaccttcagatatatttgtgaggtaaatttttgtttgaagaattatatacctgccctttctgactggtcaagtgcacgcttttaatcaaatttatcccaaagataacttgaaatccaatgggcactggatttgagttttctttatctgatgtgacactggaaaaatgtattttaagaggctggtgtgttttctaacagcttaaatcatgtgttgattttctaaatgttcttatgtatatcatcacaaccacaattatcatttaggggcacagcttttaaaattggaatttaaaaagtcttatttaaaaagctgtacatgttctcctataaagccccgctctgtaattgtttactgtgtacttccaaatgttgtaaaacacagttgtcttagggaggaaaacaagagggtcatttaattatgttcattgagtgaattttctggtgtgagttgtggaaaccagtcttataattagaatcatacctcatttaattaaacaatccccttagggagagctattcttaataaatgccagtgttttctatttctgcttcattatataaacaggctccagtagagacctttgttttacagaaaggaaccttagctttgaggtccatcctcattaacattcaacctttcgctatgattttataagttaaaaaagaaaatatttactatgaggaaacagcagcactgacataccttggatcaaagtttccttaaaagagatgccataccacaaaaaaagactaaagaatttatctcttattgagcattctccaccccacctactactcctctaccccaagcagcttcttttctgctataaagttattagttcagaaaccgtgcaaataggttaacacagtatatcctttttgtagtaaaattaaaacttcctttaaagtacttaaagaaaagtactttctgggtctaccttcaattaataagattaccattttctgaactttcttcttgttgcccaggctggagtgcaatggcgtgatctcagctcactgcaacctccacctccctggttcaagtgattctcctgtctcagcctcccaagtagctcggattacaggcatgtgccaccatacccagctaatttttttgtatttagtagagatgcggtttcaccatgttagtcagtcttgtcgcgaactcctgacctcaggtgatccacctgcctcggcctctcaaagtgctgggatttcaggcatgcaccaccgcgcctggcccgtttcctgaactttccatatcttcaatatttactgtggaccaggcactgtgttaaaaccttatctcaatctttagaacaatcctatgaagtcagtactatgattatcctcattttgctcttgaaaatattaaaggtcagagacagaggttaacaaagtctcacagttaatgtgtggcagagttgagttgaaacccagggctgtcagacttggcattgagaaagaaaacttacatagtgaagctatcaataaagacctgtcaaaaagctgtgataaagaattcaactcaactatactaatcgatttgcaccactgtggaaattatttttacggagttcagtaactgcattgatagtaaggacttctaatatattcttactaagtctttgagaatagttgtgaaactgataactaggctatgtgttccaagtggcaatgagagtttttgacaggatacatattgttactttttgagatggagttttgctcttgtcgcccaggctggagtgcaaaggcgcgatctcagctcactgcaacctccgcctcctgggttgaagtgattctcctgcctcagcctctggagtagctgggattacaggcgtgcgccaccacacccagctaatttttgtattattagtagagacggggttttaccatgttggccaggctggtctcgaactcctgccctcaggtgattcacctgccttggcctcccaaagtgctcggattacaggcgtgagccaccgcacctggccaagatttaatttttaagattaaaaaattggatagattaagagttttggggcagaaaagaaaagaagcatgtgatggttgtttgtcaatgaaacttctgagaaacaagaaaggaggactgcctatgattgtatctaaatgctacaacaaatttgactgacaagaggggcttaggagaccccgcacagaagaggttttaatgaaaaggaagtgaaacaccaagctcacataaatttttaataaacttttttgtgtctatgtcatatttcataatgtttttcctaaatgcttaacctaggaaacacatgtgtgcacacccatgccaaacacacaaatgaatttaacagtgtggtttatgaaatgaaagcaataatagtttgactcttcagaacctcttcattgtggcctatgtcaagctctctaatcttttctcctcaatggtaggccatggttaagggacagatgataaagtacaaggttttcaattgctaactgccaaattttcataggttatagtattactcaaaaagttgttttgtctcatttcttcaaattttgaaataacttgctttgctgactcatctgactatatttttaatgaggactggctttattagcacttttagaaaaaaagctctgcactccacactgaaagtcaaatcaaatagatagttaattatttgtagcgtggagtaatgtatgctcagtctctcctcacaacggagccaaaggtcacaaacatttacagaaaacctacttatgtcccaggtactctgctaggtactttcctaacttgtctaaagtcacagcataggctgggtatggtggctcatgcctgtattccagcactttgacaggacgaggcgggcagatcacctgagcccaggagttcgagaccagcctgggcaacatgacaaaaccctacctctacaaaaatacaaaaattagctgggtgtggtggtgtgtgcctgtagtcccagctgctcgggaggctgaggcaggaggatcacttgagcccaggaggtagggtttgcagtgagccgagattgtgccactgcactccagcctgggccacagagcgagaccctgtctcaaaaaaaaaaaaaaaaaaaaagtcacaacagataagtcatagagctgggattcaaattcaggtctgtctgaatatagagtattttctgctacattatcagttactgagggtaattgaaaaatttaacacttatcatggaccaggcactatgttaaaacattatctcattaatctttacaatgatcctatttaaaaatctgtagctgtaaaagaattttatacaacatttatacaaaaatcatcaagattcttcatggcaagttaaaatgtttttaaatagtttgaggtcatcttgatagtcattccactacccatttctcagtctcttcagcaaaatttcctttcacttatagctagctacctgaccatcctacactaaataagcagataatttaatcttccaacttcttgaatttgtgtgttcttttatgtacatatgttggctgactggaacagaaggaggcagggggtatatacgagcaagtatggtttattacggacaaatggtagaaaaatgttactaatatccatagataagttccttaagtcatgtagagagactgttattaaaagtttgctgcatttttctattgaatcaagaactagctaccagttacagtgccttctaaacacacagttagctttgctttatcaataaccaaataataaactaggtcccaatggttttgtccacatctagattgttcaggtgatcaggaactcttttatttgtgtgctttagcttttagttcttggttatatctataaagaaaacagaaagaaaaataatcatcaataataatagacaaatttatggtaaggagagaatgggaagcatactccatttcttctttcttggtggtcaagtagctatacagttgtaaacagaatcttcccggagggcttacaggtagaaacaggcagaaaggaaaggattcaaagagttcatttgcatctggattttgtttcagataataagagcacaactgccaaaaactttttttttttttttttgagatggagtctcactctgtcgcccaggctggagtgtagtggtgtgatctcggctcgctgcaagctctgcctcccgggttcacgccattctcctgcctcagccccccgagtagctgggactacaggcgcccgccaccacttctggctaattttttgtatttttagtagagatggtgtttcaccgtgttagccaggatggtctcgatctcctgaccttgtggtctgcctgcctcggcctcccaaagtgctgggattacaggagtgagccaccatgcccggcctgccaaaaacttttaacagcttagctgacatatagtttcctgtgcaaaagtattattttaataaaaatattctcattctggaattctacaagaacgtgacaaacttgtgaacatatgtataaaatttagtaaaatgtggtcacctagaattttaaaatttatactcgcaaagcacctttcctaagaataagatcaacaggtaaagtaaaatatactaaagtaatcactaaagtaaaatatacttctaaccactaaggtaaaatatacttctgtgatgcaggcaggctattgggttaacagcctgtaaacacttaagttcacaaacgctaaggaccatttcctcaattctcaatccaaagaagtaaccacagagccatagtctttccttcccttctaccataccttgggcttcatttactattcctcctagcttataatggaatggagagtagtataaaagcataagaaggaacttattccatgaagccaaccatacctcctaggtttctcaaaagatcctgatttcaaatatttgatcataatgtcattatcataaatcactgacaatattaactactgagtaaatagtttaaaaatttccagtgctcatggaacactttccaatgaaagcaaagacctcactctacgtatcatttccaatactacataacaatacacttaagttccaatttattatatacaattgaaagtgataaaaggtttacataagaaattaataaatcataaactgtatatgttgtcttaataaaagagattatgtgagatggttaaccatctaaatgatgcacagttaaatctaaaaactaggtaacatactgcttaactgattttagtcagttaactagttaactggttaacttatttgtaaacccctagacttttctagaaatgttaaatttctactttagatacttcttgtcttagcattatatatgaatcttttaaaaaaattagtgccatctccagcctgggcaacagagcgagaccccgtctcaaaaaaaaaaaaaattagtgccatctaagtagcttttgcaacagttttaaaaatatctctggtaggcttacctccaaatacgaaaaagctgagaggctcctgctgcccccacaaagaaattaacagcaaacagactccaattttttggaataattacaagtgagtatcttgaccaaataaaccctgttgaaacaaaatgttactttaaaaagaatacatactgcttcaataacttcagtgaatacttaatattgagtaaagtaattacaacaataatgtaggatgagggacaaagaaatgctatactctgaattttcaatgtttctgtaacttagtgtcacagaaaatactcaattcttacatgaaagaggaatctttaaagtgactattaactgtaattttcttcccacttataaaaatatgttcatggcaaaaacctgaaaagcaaaagcccattcagatacttattctttctgtgactcctccatccataacttaataacttcctagacataatactgttaattcctttgtgtgtgggtgtatttcaaacactaagccactaaataaactgatataaaagaaaacaaaaatcatttatgttctacaagaaacacagaagatatttatttaatttacctgtagccatcaaaacagcagattgagctgtgctaagtttttctgcaggtctggccatatcagccaatccagcacacaccaacccctacacattaacgcatagaaagaaaaaaagtatcacaaatgtggagtaatagttttaactttaaatcaagcacaagacatttttgagatttccgtaagttagcagctataattttagtgtccattcattaagaaaatgtagattacaacaaaaaaaaagcacaatgaattaaaaaactgctttttgaactaattttattttgttaggtacactaagcagtctcacatatctgaaagtcagtagtacatatatagataagatgtatatgtatgcattacacgtacatatatattttgggttttttttggtctacctatttcacatatgaatttatatactctttatatatgtcaggaaccactaaccactagcatggaagatacctaaaagctgttaaggtcatttgtatagattcttcctttgatgttttctgccaatgttatcatttttaaattaaattaaattttagatttggggtatatgtgcaggtttgttacatgggtatattgtgtgatgctgaggtttgggcttctaatgaattattttttaaaagtataaatatcagaaaaacttataattttagttttttggttagatcatttttttttttttagacagtctcactctgtcacccaggttagagagcaatggtgcgatctaggctcactgcaacctccacctcccagtttcaagcaattctcatgcctcagcccccaagtagctggaattacaggcgtgtgccaatatgcctggctaatttttgtatttttaatagagacggggtttcaccatgttggccaggctggtctcaaactcctgaccgcaggtgatccgcccgcctcaacctcccaaagtgctgggattacaggtgtgagccaccatgcccggccttggctgttacgccatttttctttaacatcagcatatacatggccatttctcttctgtgtttttaacactgtctctattgcactcatgcgtttttgctcccaccagatgagctgtatttttaccaagtcactatgtttgtccccaatctatttatgccagttttacttgttaatgtaatttacatgatttaataaattgtttttttttaaaaaaactaagctggaaattatataggatgcactgtagtgtaatttatccaggatagaaaatgtggagctcagaaatccatacacaaataaaagatttagctttaaaaaagactgattgtcaatgaatatatatttatatcctttaggttaaaataaaatatttaaggtacataggtttttgtttttaggattatccactttgacctttatgattagttatgtggtttcaactaaagtggttacaaaggactctactacagttatatgtttgaaggcatatggtctgagagtcttcatgttatagaacatatgtggcttgcagaagcaactgttatgtgtcatgtatagaattctacagattaattatcaaatactctgggatagtaaaacacagtaagaggtatataaggtaagtatctaatagaagaagtctccccaccagagaacaaaacacagaagtttctattgctatgctgtcatctggagactatgtatgatttcaacatgtacttaaaatagatgttcttaaagagacagatagtcaagaaggcatttatgagtatataatgctgtcaatatctcacaacagtaatgaaccagttcaaataaaccccaaagctattgataaaatcaataaactcctaaactgtggtaaatttgagatcaaagaggcccctaaatttattgtgaatagatgaaatcactcaaactcttttaatgattgaatacttcagcaatcaattccactataaagatatattattactatgtaattttaagtgtaggtagggagagaagaaggaaatggtaatgtaacttccattagtatagggggttttaggatcttttctcaatatgtagatatgaaaaaaaaaacctgctccctagatctctgtaaaatacagctcccgaatgacttatattctaatcttgtcactttatagttgaagagacaaaatgacaaagagactaaacttgcccaaggccataagattgagtcatagccaattccaactctaacattctcaaccacttgaatttacaactgagtttctgaattgttctaaccattttaaaagtacatttaagagaattacaacagcccatcactcaacaacaacaaaaaacaccttgattaaattaaaaaacaggcaaaggacttgaataaatatttctccaaagaatatacacaactgaccaataagtacaataagtatatgttcagcatgactaatcattagggaagtgcaaataaaaacaaagatatctaacacccattaggtgcctatcataaaaacaaaaacaaaaatgctcccccatcaaaagtaacaagtgttggtgaggatgtggagaaattagaacacttatgaattgctggtagaaatgtaaaataatgtagttgctgaggaaaacaaaaaatattaagcagaattatcatatgatctagcaattcaacttctgggtgtatactaagaagaattaaaagtattgacttaaacagattcttgtacatcaatgttcatggtagcattattcacaacagcaaaaatgtggaagcaaaccaattgtccaatcaacatatagaagaataaacaaaatgtggtaaatacatacaatggaatgctattcagcattaaaaagaaaggaaagtgacacatgtgacaacgttaatgtaccttgtggacattatgctaggggaaataagccaactacaaaaagacaaatacattttgattccatttacatgaggtacttagagtagtgaaattcatagagacagaaggtagaatggtggttgccagggactgggagaaggagaatggggaattatgggtacagagacttgcttttacaagataaaaagggttctggagattggttaacaatgatgtaaatgtacttaacgctactgaactgtacactttgaaaatggttcagatagtaagttttatatgtattttaccacattaaaaaaaaaaaagcctacagaccagtggttttcaaactttagagggcattagagaatcatccgaagaggttatgaaaacagagctcactggactccacatctagagtttcagatttagtaggtctgtgatggggcctaacaagttctcaaatgatgccactgcaggtccagagagatgacactttgagaagcacagttatagacccaaactggccctttcaacataaaatcaatgatttgctacaaacagccaccacaattgtttcttttcagctaagtaagaactttaagaaagaaaactttggggaagagtaaaagcactgggcttggagtcagaagtcctaggttctctcatttaccaaatgctaatatttatattcgaataaatccatctactttttgagagtaactttcctcacctatattttggtgatagtaccttcagttctcatactaaattaataataaaagttaacttgggggttctaactagcttaatgttttacttagtaataacattttagaatgaaatttcatgtccatgtggtgcacaattgtaagttttttgataacaagtatgttcccagaaggcctcttatctaaagagttcagaaaaactaaagtagatagttgctttatgtagaaaacgatatgtctgagaatatttgccatgaaatcatctagaggcataccaagaatactctaaagtatatccttcataaaagttacttcaaattagtaaattcctattaaggaatttgtctttcagtagcttccgtaaaaactcaagacttacccatttcataattggagcccagaagaaaactgttctgggacctgaaaaaaaaaagaaaagaaaaattcaggaataaaccaaatatattatacacgtcttttaacagctgtcaccaaattttaaaaaccaaaggatttatcaacctatttttaaccacttttactatgctttttgcatactttgtatttcagttaacatttagagaggcaccacagtatcacagtacagttgacccttgaataacacaggtttgaactgataggttcaactgtatgcaaatttttttcagtaaatatactgccatataaaaatattttagggaaccttgattctaatgtactttcatactagttttacactcaagtaacactctcatcccaaatgaaaatgaacccagtgataacaccccatttttgtgcattttggctgaattactataacaaatagttgggtaatcttaacattaagcagcaaaatttgaaaaatgtaaaaatggcagttgcttccctccaatttttgcttagtatgcaggttttgaaaagtatcaccagatagtgcaaactacttgcctttagccttaagtgatggtaatgctacacattctgtcttccacaatttaacatagtccttgatatttttgtccctctcgaattcacagtattcttacagcaaaattcattaattcaatgtcattttaaaatctaccacagtacattttacatattttactccagttatttgtaaatctatgtacctatcaagattatgactttctcgaagctagtggctcaatactattcatacttgtacccctattacctaatagaatgtagaataataaataaaaaggaaagttagccagtagagttggaagcagtttatactaacatttattaccctaatatatatgtatgtgtatatataatatacagatatacatatacacatatatatatatatatatatatatatatatatacatatacatatacacacacatatatatatacacatacaaacaacgttttttttttttggttttttttttggttttttttgtttttttttgagacagagtctcactctgttgcccaggctggagtgcaatggcacaatctcggctcactgcaacctccacctcccgggttcaagtgattctcttgccttagcctcccaagtagctgggattacaggcgcctgccaccacacccggctaatttttttgtatctttaatagagacagggtttcaccatgttggccaggctggtctcaaactcctgaccttgtgatctgcccgcctcagcctcccaaaatgctgggattacaggcgtgagccaccgtgcccggccacaaataacttttaaagtactttaaaatcataagttgtttttatcagcctgatacttaaatattgataagtctgtcttatgcttttaatagttttaaaatatgtttgctgattttctaatttaatcctaaagtcctacagcaatctaagtttcattttctcattcttcagagaagctgggtatcattagaataattcttcaaacactagaaagaagatcacggcacaaaccctgtggttccttgtgggactactcagcccattataatgttaaactttattttctcacatacatctggtatctaaccatttttacattttcttgtgtacgttcgaattttccgtattttaagttgtagaataaatctaaaaacagtgctgaaacagctggtgagagaatttaaactatcaaggagttctaaattttgatgttcttacaactgagtgaaaaacctatctatattcagtttctgttatccagttctctaagcagtattgttctgggcacagccaccacacacatagaactctagccacatctttttctctctacaagatagaaaataatttagtttcttctttggttaaggttggaattgaagacatttttacgaagggaaaaaggggaatataaaagaaaacatgaagccactgagtttcagaatatataatcctaatttaactaaatattagccaagtcagcggttctcaaccaggagtgtccccccaggggcatttttagttgccccaactgtggtgccccaactgctgcagatgctgctgctgctgccgctgctgctgccgtctagtgggtagaggcctgggatgctgttaaacatcctccaatgcgcaggacagccgctcccagaaagtagagggttaagaaatcctggcctagggcgactgataagctaggcaaacattcaactagtttcatgctattttatggctcttcagttcatgctgtcccttctcaatatcctgcttagtctttacctaactcctatccatcagaaactcatctcaggttgcatctcctcaaggaagccttaaaaaacaaacaaaaaaactccaggttaggctaaattgctccttctcttaactaccaaagcagcctgtatattcttctatcattttctgttaaaatgattatttatgcatctgtcacattaacccgaagacaaggtccttttcttaatcttccttgacaaataataggtatgtgccaacagaactgaattggatccaccatgttcaggatagatgctaatcaaagatattcaaactttctgtctgacccagatttgcctcgacactgcttcatcctcaaggctggaatttgctgttttctcatctctagggacatcaggttccctttatgccaaggatatattagatttcactcattagttactctactcttagaccacagctctcttcccctgagtctgatgccataatgcattaatcctataagtcagtcttctcaaactctctggaaatttagggtgagattctgggattcctatcattacacctggttcatttttctttgtcatacacagtgtctctggctcatacacagtatcaattactaagtttagtttttatcctcgcatggagtttcgcttcatcaatcaagagtcagtccatgtattgttttagtctctggctgaatgggtgttcatttttactctgaactcttcagcagacttctcttgttctatttgaaagctgaagtttctgtcaccccaaaattgttttctgagtaaagcctctagattctggtttcaagcttaaatggctgacaggcttaaatggttgatcctttggggttaatagtcgatcttttcagtaggtttgcctggtaactaatttactaaactgcctagagctaggtaatagttttacaatattaacaacagcccttccccaccaaaccaaacaactgaaaaaacttcaaacatcaaattatggttgctagaacctggaccaagagaggtattttagtgagtgaataattttaaactatgaaaacaagctctaattttagtttaacaactgctatgtactaaacagaaaaatagcagtagccaatacataaggccttctaaattgctaatttttctgagatactaaaagatgtggacaagtgacaaaaaaatcagtttaatatctataactgcaaacagtgttttcttaactgttaaaaaaaaaggtcggccgggcgcggtggctcatgcctgtaatcccagcactttgtgaggccgagatgggcggatcacgaggtcagaagatcgagaccatcctggctaacacggtgaaaccctgtctctactaaaaatacaaaaaattagctgcgcgtggtggcaggcggctgtagtcccagctactcgggaggctgaggcaggagaatggcgtgaagccgggaggtggagcttgcagtgagccgagatcgcaccactgcactccagaaaaaaaaaaaaaaaagtcacacaatgggttaacaaaattttaaagaaaacttaaccctttcattgtagctaattaacattcaattaacatttcttagcttttttttcctgtaagagtaaataatatgtcaaataaagctagacaggtaaatttagacatatataaaacagatacagaggctgtcttccagaaaacagcaattgatcaacagtggatatggtagcgaaaaaacattccaacttacttcaacatttctaaacataaagttttgacaaaacaaagcatttagaaataggtatcactcaaatagtgacaatacaatgtcacatgtgtcattctagacctggaaaacacaggcttatgttctgtacaatgacacagctattctcataggagagcataaaaatagataattatgacacgtgaagtgattataataccttaatattagaataagcagatgtataaactaacagatacctggctaacatccattatgataaatgaaataacttgattaggtggaaaatttgaactgctgaaaatatactgaagaaaaatctcctcataagacattaatttatagcccaagatgaaagaaattgtccacatcaaacatactatatattcttttagaaaaagaattaatacattttcatcttgtttctttgaacagtactactggatgttgaagaaggcctccaatgctgacaatttagaaacattaaacaagtatttaaaatgtctatacatttaggccgggcgtggtggctcatgcctgtaatcccagccgtttgggaggcggaggtgggcggatcaccagaggtggggagtttgagactagcctgaccaacatggagaaaccccatctctactaaaaatacaaaattagccgggcgtggtggtgcatgcctgtaatcccagctacttgggaaggttgaggcaggggaatcgctagaacccaggaggcagaggttgcagtgagccgagattgcaccattgcactccagcctgggcaataagagcgaaactccgtctcgaaaaaagaaaaaaaaaagtctacacattttaaactatgaactatgttcaagaatgaaaaatactgactataagttattttgtgttttattgccttatttttaaagtgaaactcatgtttttaaattctaacttttcatagaatttgagaaattctacaagtgaatatcataagcaaataataacagacataaattttcaaataaacaaatttagttgccttgaacttcaatgaacctattaataaactgacataaacttacttcctaatttccttatttgagagaaattactgttaataaaatattatatgaatcctacccagaaagtaggccacctatcgtatatatgattccctccctaagtaaagactaactttttggaacagaataggtaatttttactctcaagcacatatacacacttacaaatactggattgaggtattcactatatccctctgtgaaaaataaagtttcttactgaatgctaagaggtcataaaatcactacatttccctacctcttcccatccctttcatgccactcctttatggtttgttactttttaacacccctcttaattccttacattacacaagttcacctgtttgctatcatgtgacaaactagatacaaatccttagaatatgtaaaggttaatctttgacatggatactgacggccaaaaaatcattcatttttatttgtgccaaagctagttctgatttaacactaagaacatgactaagctaccattttagagccatataattttaatattttccacaatgccttggaaatagctatcactaaaatagtacccaaaacatcatgggtagataatgtttttaaaaatgttgactgaaaatacactttggtttgaaattccagagtaaagaacaggtaaagagactaaaatagctaagatgcattgtagggatgatacgttttaaatttacttatttcttcaggtacaaagaatcagttacttttagatttagaaagactgttgaaatcatctactgtaggcactcataaatcaggcaaatgaggcccagtaaacaaattacttgtttaaaataaataatccaacaaggataaaaaactagatccctaaatcctaatctaacaataattatatgactttccccaatgaaatctgagtttcctgaaggttctgaatgtaagaaaagtcctaagagaataccaaattatagattattagctggaaaagactttaaggaaagtccaagctccctcatttttataaatgaaaaagatgaggcacttacaagttaagtaatttgtcttacactcaggagagttctggatagagcaacgactagaacacagtttctttgatcctagtcctctttctactgtaccatacagcactttaaacatatttcattctctgttataagcaaaattaatatttttacatgacctggaaatgataaactatttatagcttagggctttcttctcctttagcacatctgcataaacagttctaatttcttaaagttagtttaaaagcaggatagcacacaaaaaatatgttaagtgttgaacaactgcatcaaggatgataatctgctctgttgcccaggctggattgagtgcagtggcacgatcttggctcactgcaacctccatcttctgggttcaagcaattctcctgcctcaccctccagagtagctgggattacaggtgtgcaccaccatgcccagctaaatttcgtatttttagtagagacagggtatcaccatgttggccaggctggtctcgaactcctgatttcaggtgatccacacgcctcggcctcccaaagtgctgggattacaggtgtgagctaccgcgcccagctgatattcctttttatgaattcttctgagaatacaaactctgtgtgggtgggtttcgttattttatccactgctttatcctgagtgccagaacagtgtctaatatacaataggccctcaataaatattgaataattcaaccttcttggtagctgattgtttgaagatattctatttttcaccaatattttacaattgtatttgaaattctaatcttacatctattttagttatctcttaactttaaataagttattactttaaaaaataatatatgtatatttagtgtatttaaacttaatatattaaatatacacttaagaatatatatggacatatattaatatcttagactggcattaagattcttcactgacaatctgtggcaacaaaataagttctaacagagatgctaaagaactgtgtaattcaaactatgtaggtacgtacactcattatttgatccatattagattttatttacatataatagaacaatatatatttgcactaagttgtatttaaccatctattgtaacatcaattctcttagcattgaatataaaatttttatgatacagatatttccttataaacactgataacattggttcatttagtttatttttatttaaaaagaaatatcctctaggtctttaaaattaaacaagctaattatctaggaaaaatgcaaatattattcttatttagactttaaagtaacttttcccatgagtcttcagagggaacccatgtaatgttaagaatgatattctcagcaccagcacattaagcactgcaacaagtttcacagaactattttttcaaaagctcttccatgtaagccaaaatgtaattcagtaaaaggagagctataatgcgttaaaatgatatggttcagatagctgtttttgggactaacttcaccaaaggatagtttttagactctttagagctgtggtcttccagctcctcttgaacatatgccctatcagtaaaaaacaatttgagtatacatcctgtttataaatcatttatatatttataaattatatagaattactgcaataatatatttttgtattacagaatgtatacacaatgaaaaatttaagtggatgaaataacagtaaacgttactggaagttctataattttcttcctacattccagtgtttcattgtgtgcaccccttgggatgacttaccccattttggaactcacaaatacaaataaatgacactcctccactgataatttttttgttttccttaactaagcttttaagaaaacattgggccgggtgtggttgctcacacctgtaatcccagcactttgggaggccaaggcaggtggatcacctgaggtcaggagtttgagaccagcctggccaacatggggaaaccccatctctactaaaaacacaaaaattagctgagcatggtggcacatgcctgtaatcccagctactcaggaggctgaggcaggagaatcgcttgaacccaggaggccaaggttgcagtgagcccagatcacaccactgcactccaacctagggaacagagcaagactctgtctcaaaaaaaaaaaaaaaaaaagaaaagaaaagaaaagaaaaaataacactgggcaacataacttcaagattatttctttgacaaacactggagtacagctatgcaactggctagggtggagtcacatatttttatagtcaggtgggggataatgcggggactgacatccttttttgtgagttgaggaacttgaccaggacacacatttggctagaactctattccttctctacagtggcagatcatgacatgccagcaaaaacacataggcaaatggataatgagagcctcaaaattctggctcacaggtcagagatgcaatactgtaactaaaatatgtatctatacataaaaacacattagtttttttttttttttttgagacagaacctcgctctgttgccaggctggagtgcaatggcacgatcttggctaactgcaacctccacctcctggtttcaagtgattctcccgcctcagcctcccaagtagctgagattactggcacccgccactacacccggctaatttttgtattttagtagagatagggtttcatcatgttggtcaggctggtctcaaactcctgacctcaggtgatccacccacctcagcctcccaaagtgctgggattacaggtgtgagccaccgtgcctggctaaaaacacattcttgttacctgtcgagacatacagtgtcagtgataaaattaaatctcaaaaatctagaatcagcaatgtatgatttccaactgttaatattgtagcatttcatatcatttaataaactccttgtaggtgaatctagaaaaatgtttcaatgacaattcaataacaaatactgttaggcaaaatagtatgcaaaatccttgaatattcactctggataaactcttaagacaataatcagtgtttccttagattttattcaatactcatcagtcaacgtatttttcaagctcctccatttctacactggtgtgcctccaacttgtcgatcataaataattctgctgtaatagatatccttactctgtatgttgctcaaattttagaactgacagttattgagagtctaagtgcaaacgctgtgctacatgttttagagacattagatcatctgattttcacaacaatcctgaaatgattacaattactcccattttatagatgagataactaaggcaggaatttagggtcaaggtcacacagccaagactgaaacgtaggtctatttcccttcaaagcctagctccttttactacactgaaaaagggggttaaaataactgaacgaatccaaggattttcaggtgaaatgcacatcctgcaagtgaaaggtaatccctcttcattctgaaagctgagtagtattttaagcagtaattacaggtggctaaaaactaaaggcttggaaaggatcaaggtaagactaccctccaattttgtattattttaagtagtttaaaattactcttactctgtcatgcccttatcctacagctaaaacacaaagcttatgaaggtcagggttgacttcacattcagttgactctgtaaagcccagattattacaaaaagcatagctcaaccctccttcccgaaaatctttgccacaaaacacagcataattccaaaaaaattgaatgttaaaagaactaaaaggcaaataaacaaaaactttttaaatcagtaacaaactgtccttaatgatcagttttataatgggttcaatgttgcagtaaataatattaagggttagagtataatccagatgttcaattcattccattatcaaactggaaatcagatttagtaaccagttcagactccagagagctggttcataatcagataatgggggaactagacaactttcctaatgataccaactacagaatacagattttaactatgtaggagaataaaagccacttttcgggtagcacttcagtctttcaatttacaacacattttctagtttgccaagtcttaggcttgaaacagacctcagaatatatctgatgttagcccctagcaaataagtattattacaactcactttatagaagaggtaacagaattctagatctttaataaagggattggaatctttcagtttcttacagttttttttttcaaccacaagaacacagttttccagtaggcaaagagagatgtaacgtttactgagcatttacaaagagtcaagcacatatgttatctgtcattctcatagaccgcgtattacacaaacagagatctaggcttttgctcaaggtcacaactataagtggtagaagagaatgatatccaggtctgtccacacaaaaagctctgggtagagcttgttcaacaatttcataaataaggatagacttaaaaaaacacactggacctatgggatgagaaatgacactgactcaagcctggatgaagtaaagcatgcagtttgggggagggctcagtctgcaggcctctgccagcagcagctgaagaaagtgacctttactccaaaccctacagtgcgacaaaccacccatccagctctgcctagagtgggtatgccacaattcgaaaagagaaagagaatgagtgtttcatggtggccccagacagtttggtggccgcagaagttgagaaggctcaaatctggagatcaggtttgggttggagtcgtgcgtaagggagcggatgtcacataggtggggaagggagctgacttgagatacgttggcttaggaagagatgttgcaggagagagggtgaaatgcacaggctaggagagtagacggcttcacttgaagggaagggattggggctgtggatgcctctagaggcagttgtcagagggcctctaaaaggtccattttagaggaagcgagaaggaaggtctcgataaggagccattcagggtccattacctgctggatggttgtacaacggcctcaatttctcgggcagcatcagctccactttatcgaggagccggtggtaggtggcccgcaggcctcgggcaccggcggccgacatcgccgccgagggatcgttggcagccgggtgggagcgtggctgtgttctcgtccctggctgacaacgaaggggagctagtcacttttcctgccacgacgactcgcgtccgcctctcgcctggagtacccttcccgcggctttccctgcccgctgtgaaccgaaaagctgcggcccgcgccccgcgaaggttgagggggcggaggctgccgactgccagcccccggtccgcctccggcccccggcaggagagagggaggagccatggcaacaggtgccaaaataatcacctcaccaagtctgcgctgcgccctgctggcagcgcgcttgcgcaggccgagctgcccgccatgattggcccgccccgaggcgcgggcggggtcgagcggaaacctcctccttctccccatgccctcgaggccatgttggagaagggaaagtgaagctgcgctggttctactgccctttcactttgattaagcaggcccgtagttaaaatgggtttttgggccttcagtgcctaaagatgatgccgcacaattctcttgcttcttttcactggagactcgtgagcgagagactacagaattgagtagcttctctctctactcgtcttttatccctagcgacttaaggatctggttagagtggcccgaatgcattcttccagggtgagggcagccgcagcacacaccagcctcagtccccagggtggtcgtcatctcgcgagaaagggttggcggggagggtatccaggacgaggagagggaggagtcgccatcgcctccgcctccgcctcctcctgttggaggggggctgagggaggagactgttgctgatctttggatgttctggttagtctaagaaggagagtatgaggcgagctccggcccgggtgcggccgggcttcaggggcccaggcgccgctgctgccaccgccatctaacgctgcgccctggaggcccggcgcgcggatggtgccggtgcggctcgggtgttgaaacgggtgtcccctccccctcctcccctcccccacgcggtggtctcccctcccacccggctcaggcagagccatgtctcggggtggctcctacccacacctgttgtgggacgtgaggaaaaggtccctcgggctggaggacccgtcccggctgcggagtcgctacctgggtgagcgggggccccggggcggaggcgctgaggtcgccgcctagagtgggggagggggcacgctgccgggtctgttggaggtgggacggcgtctcggtgggggcgcccggagactctggggtgttgggtggggccttggttgccgaattccgtgccggtgcctcccccagtcaagccccctgtgcatgctgccagccgccgcccttgctgggtttttctcggagggccgggccgtgggcagaaggtactggcttgtaaaggtgttggggtcgctgatgggttgggactcgggagacttgcggaacctccaggagctgccgcgtttagagcaaaagttagctcttttgctcttttccagcgcgctttccccgctcagccgaagaacctaagttgttgcccaccctctccttcaatctccagagggtttaggtgtcggctgcgacgcgttgaccaccctcagggacttcacgctccagacagaatccgtgtaaactgtttttgcggcgctgagccaaaacctaaaagtgatagctgagctctccccacccccgcgcgctctcccagttccactctgctcttcagttcgttttgaccgcttaaaggtggtgtagggtttcacgttcctcttcccacccctggaaaacacacttggcatttacagtttcgtagttaagctttctaaaaacaaccttcagtacttgggggaacagtattccacttttttcgttttgcataacattttttttttgaggattctaggtcacgcccgagtcaactaaaaagtttggtttcttaaaaatggacgtacttagtaaaggtcttttttgtttcttcctgtatactcttcattactctttctttctatttggagatacggcaaacaacatcataaaatttttttctttccagttttgccacttgctagttaaaaagtgtttgttgctctcatttgtttttgatttcaagtaaagagaagaaaatgaaatctcattacaaccaacagttctggtttgtaaattatttaagaaaagttagcatgcaattttttaattctttttagtgtctcaagtaaaatacgaatacattttgtttataaaaactcaataaaaatgaagcaaaaatccctttgatccctcccattcaatttcactccgccacccttagaaataatattttctgttttctgaatattcttccagacctttttgtttgcattcttacaagtacatatgtacatgtacaaatgctggggtgtgtgtgtgtttgtgtgtgtatgagagagacacctgagtgcatggtgtcatattgtaaacattgttttcacttctccacattttggagatctttccatggcagtaaaaatagattgattctgtcttttaaattattacatagtaggtaacattatgaagtaccatagggtactcaacctttcttctttaagtagacgttcgcccttacagcattttaatgaacatcattctacaagcttctgtgcatttgttgtaggataagtacctagagtggtgattaatcattttaaaattgaacatagctggagtctggtttttaaaactatttaccaaaaaaagtgtgcagtatttcttttagaatttatttgcggagaaagaacttaattttagcttaataaaacaaacgttaacattgttttgcatggatacatttataatttggtcctttatctcagttggacagtttaagtacttgtatatagttctatattttagtgttttcttttggttcagttacttcagctatatctacaaacgagttaattaaaatataacaaaaccatatacctgcttttccccctcctactccaactccctaatggaaatggaatttgtgtattgggtctaggggaattgaagggttcactgactatattagaaagcctgaattacagtttttcaaatgtgtatgtatacatacagggagttctttatcttaaataatattttagatatgataatatatactcttaaaataggacatttttggaatgacttcctttaaaagtggttttctaagtacttgaaaatactttttgaaagtatcgaaacttgaaaatgtttgcaaagaactaatttattggcctttacccttagtagacctttacactgttattcagctcttctatactacagtgctaatcctggctttgcattcaggaagcagcaaaatccacattggtaatgtttgaattagtgatggttttttttaaaaaatgactttccctcccagttttattggggtataattgacaattaaaaattgttatatttaaggtgtaggacttgataacttcatatacaatcaagttaattaacatatccatcatgtcacataattaccatctttttttgtgtgtggcgataaaatgactttatcattattattaattttatttttattattagataaaatgactttttaaagtacagtactcttggccgggcgcggtggcttacgcctggaatcccagcactttgggaggccaaggtgggtgatcacttgaggtcaggagtttgagaccggcctggccaacatggtgaaaccctggtctttactaaaaatacaaaaattagccgggagtggtggcgtacgcctgtagtctcagctccttgggaggctgaggcaggagaatagcttgaacttgggaagtggaggttgcagtgagccaagattgtgccactgcactccagcctgggcgacagagggaaactctgcgtcataaataaataaataaataaataaagtatggtacacttataaagccttccttttaaaagtcaaattccaagttaggattttcctaaggaaatagattccttttttaaaagacttcaatatttaaacattacgattgtctatctacagggttgtagatttaagtatttttctgatacattttcattatttgtatttctacagattttttagcagtgaattactgctaaatagtaaaattgggatagaacaaatagataaatttttcttgtagcctttacatttccagttatttcaccatagcatgtgccctttcaatgttaatattcaagctttgtaattgattttacttaaactgattaattatctcctttcttcccatcaaagaaaattatacttcagaaaacttcctattatgttgtgggaatgaagatgaataatttcccagatgttatttatgattaaaagatatgtttacttagagctcccaaatccacaagattcacctgggccaacagagtgttgttttagactagcatggatttagaggataggccagggattttaatctttgtgagccctatctaaatttcaatgtaggattcttttttttggtgggaggcggggggcagggtgaggcagggttttgctctgtctcccaggctggtgtgcagtggcaccctcatggctcactgcagcctccacgtcctgggctcaaggccatcctcccacctcagcctcctggaatttttttttttttttaaagaataattatcaaagtcagagatacctgtaggtttaaatgtttaaatgtaatagtttctcaaattactgtatactaggtgtagagtagtgcttttggaaatcagtgatttattagccacacagattttattatcccatatatatacggttttgtaaagataaacattgttaataaaataaacttatttcaatacattgcttgtttctactcatatttctttccttttggacagacactcctacaactttctaacccttctaaattaaaagatagtaattgataaaaaagtaattttaaggtacttctcaagggagttatttattataatgtataaaatgtgtaaattatgattaggcagccagtgacaattttttagtggagattgaatctcatctttttgtaaggagtttatgaagtcagtgtcctttgaatatcattagagtcagtatgtactgaaatggataattttgcgtgtcgattactctttagtgcatcttgaatacatctgcattctagattaccaggttcttcataatatgttgccaagttacagtgtatttattatatgaagattagtaacttctgacttttgcctctttttttagccattggggaaaagttagtgaaatatttgtattttgtttctttagtcttgaaatttcagtgaaagctgaaaaatgtatgattttagtattgaaaaatgacggtcaattgtgacaaacgtaagatatactgataattccttaaggcaggacaccaaaggcatataagtaatcataacaaccatagacactatgatagctctactgtgggtttcattgcttcctaaaataggatgaatcaagttataagtgcttagaaggtttagaagcttctggtagcatggagcttatgttacaagtatgctttaggtcagtgtttttaaaatgttttaaaaatgatccatgataaaagtacatttatgtggcaacctgtgatatacacaacgaaaataaaggattctctaggtgtatatataaaccttactagatgggatgcattctgttttttttcatattgttacaactgttggtgttgaactggtagagtacgcactaatgagtctcagcttgaggtttggaaaattgttctagatggtgtgtagttcttgtaatttaatgttgcttcaggtttaaggtgggcaggcttccccaagtacttgaaggagattaaaaaaatttttttttaaacactgctgatggctccacagggaaaatgtaaatagtgaaacttcatgtacatcttggacaaaataactagggtcgaacacttttaaatagatatctattgtgggattgctgacttgtatggtaagtatgtttaactttataaaaaacttccagactgtcttccaaagtaattctaccatactgcattcccaccagcagtatatgagagttccaattgctccacattctcatcagcatttggtgtagtgagtcttcctaattgtagccttcatggtaggcgtgtagaaatatatcattgttttaatttgcatttctctttttttgtttttgagacggagtttcgctcttgtcgcccaggctggagtgcaatggcatgatcttggcttaccgcaacctctgcctgctgggttcaagagattctcctgcctcagcctgccaagtagctgggatatgggcatgcgccaccatgcccagctaatgttgtatttttagtagacatggggttttgccatgttggtcaggctggtctcgaactcctgacctcaggtgattgacctgcttcggcctcccaaagtgctgggattacaagcatgagccgctgcgcctggcctttaatttgcatttctctagtggttaatgatgttgagtatcttttgtggcttttgtttttgtcatccatatagtctggttaaatgttcaggtttacctttttaatattgtaagaattctataattctttatataacagtccttaatcagatatgtactttacaaatattttctgtcagtttatgtctttttcttaacaggttcttttatagttcatactttttatgtcctatctaagaatctttacctaatccaaggtaacaaagatttttactttttttttcctggagattttatctttttacctcttacatttaggtctgtgaacaatttcgagttaagttttacatatgttgtaagagtcaagtttcatttctttgcatattaatgtgcaattgatctaacagtgtgtggaaagactacttttttccctttgttgaaaatcaattgaccataaatgtttaagtcaatttcctagccacattccattgatctagcttcatgtctttataccgaggattgaaatcagctagtgtgatactttaaacttggtcttttttttgagacagagtcttgctctgtcacccaggctggagtgcagtggctcgatcttggctcactacaagctccgcctcctgggttcacaccattctcctgcctcagcctcccgagtagctgggactacaggcacccgccaccacgcccggctaatttttttgtatttttttagtagagatggggtttcaccgcgttagccaggatggtctcgatctcctgaccttgtgatctgcccgccttggcctaccaaagtgctgggattacaggcgtgagccaccgcgcctggccgaaatttggtcttttttaaaaaaatttatagttatcctggctattctgaaccctttctatttccataaaaattttagaactagcttgtcaatttctacaaaaagacttgggattttgtgttgaatctatatattatttcagggagaactgacatgtttacaatatgaatcttctcatctgtggttctggtttgtctccgtgtattaagcattctttgattctctcagcagtgatttgtattttttggtgttaggtttatccttaaatatttcatatttgtaatgctattttagatgatatttttatttatttttactttttatttgtacaaatttatgggtacatatgcagttttgttacatgcatagattatgctgcagtcaagtgagggcttttaaggtatccatcacctgaataacgttctttgtcctcattaacgaatttctcatcatcctcccacctcctcattcttccactccattatgtatcattccactctgcatctgtgtgaacacgtttgtttagaacacacttatgagtcagaacatcatacttgtctttgtgtgcctggtttgtttaacctaagataatgacctctagttccatccacgttgctgtatatgtcatgatttcattcattttttttttgagatggagtctcactctgtcgcccaggctgtagtgcagtggtgagatctcggcttactgcaagttccgcctccgaggttcacgccattctcctgcctcagcctcccaagtagttgggactacaggtgcccgccaccacacctgactaacttttttttgtattttcagtagagacagggtttcacagtgttagccaggatggcctcgatcccccgaccttgtgatctgcccgcctcggcctcccaaagtgctgggatcacaggggtgagccaccacgcccagcctgatttcattctttgttatggctgaatagtattccattgtgtatatataccacattttctttacctgttcatccattgatggacacttaggttgattccatatctttgctgttgtgaatagtgctgcagtaaacatactggtgcacatatcttttagatatattaatttcttttctttttgtaaaaatctagtagtgggattgctagatggaaagatagttctatttttaattcttggagaaatctccatactgttttccatagaggctgtactaatttacattcccaccaatggtatataagagttccctttttttcacatgataaccaacattgtctgtctttttaataaaagacattctgactaggataaggtgatatctcattgtgaatttgatttgcatttctcttatgactggtaatgttgagcattttttcatatacctgttgggtgtatgcttttgaaaaatgtctattcatgtgttttgcctactttttaataggattgttagatttttttggttgttgaatcgtttgagttccttgtgtagtctggatattagtcccctgttggatgaataatttgcagatattttctgtcattcaacaggattggttgtctcttcaatctgttatttcttttgccatgcagaagctttttagtttaattgagtcccatttgtctgttttctagtatctttatagttttgggtcttacacttaagtctttaatccaccttgagttgatttttatgtattagtgagagataagagttcaattgcattcttctgcatatggatatctaattttctcagcaccattgattgaagagggtttcgtttccacagtgtatgttcttgtcggctttgtcaaacatcagttggctgcaagtatgcggctttatttctgggttctctatgctgttccattgacctgtgtgtcttatttttataccagtaacctgctgttctggttagtatagtcttgtaatataatttgaagttagataatgtgatgcctctagctttattctttttgctcagcattgctttggctattggggcttctttttggttccatatgaattttaggattgttttttctaattttgcaaaaaattaacttggtattttgatagggattgtatagaatatgtaggctgctttgtacagtatggtcattttaatgatattcttctgaatatccagtgatcatgggatgtttttccatttgtgtcatgtataatttcttttagctgtgttttgtagttctccttgtagggattttacctctggttaaatatattcctagtttgtgtgtgtgtgtatgtgtgtgtttataatttcttttttctttttttcttttttgagacggagtctcactctgtcacccaggctggagtgcagtggcacaatctcggcttactacaacctccggctcccaggttcaagcacttctcctgcctgagcctccagagtagctgggactacaagtgcgcaccactatgcccagctaatttttgtgtgtgtgtgtatttttagtagagacagggtttcaccatgttggccaggatggtctcgatctcttgaccttgtgatccacccaccttggcctcccaaagtgctgggattacaggcgtgagccaccacacccggcctttttttttttgttatttgtagctattgtaaatgggattgtgttcttgatttggttttcatcttgaatcattattggtgtgtagaaacactactaatttttgtatgttgattttgtatcttgcaagtttactgaattcatttaccaaatctaagggtttttttttttttttttttgagacagaatttcattctgttgcccaggctggagtgcaatggcacaatctcagctcactgcaagctctgcctcccgggttcaagtgattctcctgcctcagcctcccgagtagctgggattacaggcatgtgccaccacacccggctaatttttgtagttttagtagagacagggtttcaccatgttggccagctggtcttgaactactgacctcaggtgatctggccacctcagcctcccaaagtgctgggattacaggcatgagctaccgcgcctggcaaatctaagagtttttgtggggagtctttaggtttttctagatataagatcatatcatcaggaaacagggataatttgactccttcctttataattttgatgccttttgtttcattctcttgcctgattgctctggttaggacttccaatactatattgaagagtggtgaaagtaggcatccttgttttcttccagttcttaaaggaatgctttcatcttttccctattcagtatgatgttagttacaggtttatcatatatggcctttattattttgaggtatgatctttctgtgcctagtttactaagggtttttcttatgaagggatgttgaattttattaaattcttttttcgcgtctattaagatgatcatatggtttttgcccttcattctgttgatatgatgtatcacatttattgatttgcatatgttgacctatccttgcattcctggtataaaacccacttgatcatggtgtattatctttttgatttggtgttggatttggtttgctagtattttgttgaggatttttgcatttgtgttcattaatctgtagttttctttttattctgtatcctttgttttgtgtccttctttggttttgttatcagggcgataatggccttatagaataagttagggagaggcctgtccttgattttttggaatagtttcaggagtattgatattacttcttctttgtacatttggtagaattcggctgtgaagccatctggtactgggcttttctttgttgggagattgtaaaaattactgattaattcttgctgctcattattggtctattcagattttctgtttctttctggttcattcttggtaggttgtgtttttctgggaatgtatctatttcctgtaggttttctagtttatgagtatatagttcattatagtctgtgatgatctttgtacttctgtggaatcagttgtaatgtctcctttttcatttctgattttatttggctcttctcccttcttttcttggttagtctggaaagtggtttatcaattttttttatctctttgaggaaccagcttttcatttcattgaccttttgtgggttttttttttcagtccatatttcatttagttctgctctgatctttatttcttttcttctgctagttttgggtttggttttttcttggttttctggttcctcgaggtgcgttcttagattattaacttgtaatctttctcctttttgatgtaggaatttattgctgtgttcttcttagcactgcttttgctgtatcccacaggttttggtatgttgtgtttacattttcatttgtttcaaaaacatttttttaaatttctgtcttaatttcttcattgaccctattgtcattcaggagcatgttgtttaattgttgtgtatttgtaaggtttgtaaattttctcttggtattgatttctagttttattctgctgttgtctgagaaggcacttgatgtgatttcagttttaaaaaatttgttgagactttgttttgtggcttaacatatggtctgtcttggagaatgttccatatgctgatgaaaatattgtatattctgcagttgttggatagaatgttttgtaaatgtctgttaagttcatttggtctaaagtccagtttaagtccagtgtttctttgctgattctttgtctagatgatctgtctaatgctgtaagtggggtgttgaattttcacactattgtgttgcagtgtatctctttctttaggtctagtaatacttgttttatgactcttagtactccagtgtcgggtgcaaatatgtatttagaattgttatatattcttgctgaattggtctctttaatattatataacgactttcttagtcctttttttttttttttaactgtttttagatggttttttctcttgccatttttaggattcactcttcactttgacttcagacagtctgattataatgttgccatggtggagacctttttacactgtatttgtctggtgattgctgagcctctcatatctggatctctaaatctcttaactagcagtcatctgtcctgtgccaaggatgaaataattttgtgttttgtctctccttggtagagtttgtcacccccaagtaagaactaaggctctgagaaaataagttttgcccaacctaagtgtagtatgttcaagtcagatatttaaacctaatccaacatttcttgccccaaccatctctataagtaataattctcaactagtctagtaaaggagataggtatgtgaataaataacttacaaagttgtaatttatttaatggtttaatgattacacaaccattaaaaatgagcaatagctgtatatttattgtcattgaaatacattcaccatgtgttattttattttatttttttgaggtggagtctcactctgttgcccaggctggagtacagtggcatgatctcagctcactgcagcctccgcctcccaggttcaagcgattctcctacctcagcctcccgagtagctgggactacaggtgcccatcaccacacccggctaatttttgtatttttagtagagatggggttttgacatgttgatcaggctggtcctgaactcctgacttcaggtgatccacccacctcggcctcccaaagtactgggattacaggtgtgagccaccacgcacagcaatcaccatgtgttattgagtggtaatacagattccagaacagaatgaatatcatgatcccagtcatttattcactgattcagcaaacgtatattgaatgcatactttgtggcaggcactgtattaggtatttggaatacatgggtcaataaagcagtgttcttatggagtttataacctattaatataaaagaatgccagagtagagtcagaattataagaggcagcttgaagtacagaaagacttgagttggaagccacaatggtaagttcatccataacaagtgtgtaattcttgggagaagattcttcatagctctttggatttctgaacatcttcggagcagaggcactagtcgttttgttctggactatcttctcagtgaggtttatatagtgaatagccttggaatatataacaattctaaatatatatttgcacccaacactggagtactgagagcctcttgagccaaggacaaatttgttgttcagtttaataatgtctccttagggataaaggtcgggcaggtttgcttgataaaagatttaggttccccaagttcaagattcctcagctgtgattaaaacccattacatgcacagcatctatccaggcatcttcaagtttccctatgagacttggattacaggaagaaccaatgtaaacctgaagctcatactgcttgccatacatgagtagtaaatttttttgcctctgacttaggagtttggtgtcttttgctagcatccaagaaaggtagcagtccaattggttaccttgcaaataggccagactcttcacagcttttaatagcattcagatgtgagtttattttaattttaatttgaggaggctcagttttattaaggtactgttcttattttgtggtgggtttttgcttctatttcttggtattacatttaattactaaaagggtagtggatgtttttgctagtttgctctagaagcacactttatgagatgtctggacgatgcaataaattttatctccaaagtcatgtataaaaatgtcattcaaaagctatctatttaaccacaatgtgttatgcctctatacatgttctaatgtgcaaacgtcatatagaagagttcttgctaaaacagcttactttatcttctattcttaggttctgccaccattttctccagactgaagtggctagagccatgtttcaaacgcaggttttaaaattttgacaaaaaagtttccaatactttaatattttaatgtgttttaattgctgtcatattgttaatttgaatactttgtttcttaactcgtataactcaatgagattaccaatcctttgaccaaaatgaaatgagtttttaaaaatttatcttttttactgaagttagaatctttttacaagcgaaaatcagatttgaaaagttaattacctgaagtacaacctacttcatgaaaacatgttactgaatttctctaggttgttttatttcagtaagtttagaaaccatagagcatctccctccccaaaataaaagcccccataattatccataatttttttttaacttatatgttcatcctttacctagccatcttaccagttaaataacatggagaaagaagtaaaacaaattggcttcaagaggctcttgattttgacatggaatggcaagaaagtgcaatagagaaatctgccctttgtgacagtatacagaaagtataggcagatacaattttatgagagatctcatcagcctgattacttaattattgttctttgttgtaaattcagccttctttcattacagcttctgaataaacatgctttttgatctgtgtttggtaaagatgattcattccttaaagggacagatttctctttttcaaagaaggaacttactctgtttttgcagtatttaaactgttctgctattgatggacatttatgctgatttttaatgccatatttcatcattgtaatgttaactttaacgtttctgaaattgagaaatgcttaaaaatagttggtacttactattgctgtttgccatcctatttaaaattaaaaaccttactccctacctgcagtcatcttttatctctttttcctgctttatttttctgcatagcactatactaacttatagcacttacaccgattattgtttttctcctctcataagcaggcagaaatctttttgttttattttaccaccgtaaaatatactttacctgacacagagtgagtactcaataaatatttgttgaatgaataaatgaagaaatgtacgagtgtttattgtggtccagatactgtgctaagccctttctgtccttaaaataactacaggccgggcgtggtggctcacacctgtaatcctagcactttgggaggccaatgcgggtggatcagttgaggtgaggagtttgagaccagcctggcccacatgatgaaatcctgtctctactaaaaatacaaaagttagctgggcgtggtgctgtgtgcctgtgatcccagccacttgggaagctgaggaaggagaattgcttgaacttgggaggcagaggttgcagtgagctgagatcatgccactgcactccagcctgggcaacagagtgagactgtgtctcaaaaaacaaacaaacaaaaaactgcgtgaggtagaggtattctaatgaggaaactaagtcttaggcggaggttaaattgcccagtatcactcagtttataaatggtggagctgaaattagagcatgaatttacttttcatgccagatcctaggctcctaatttctgtgttatatttttctcagtatttgtgtgatttatttaatttgttctttctttttaaacaggaagaagagaatttatccaaagattaaaacttgaagcaacccttaatgtgcatgatggttgtgtaagtaatagttaattctcaactctgaagggatttgatactaagtgtttaagtgtttgatgaaatgtcccaatcctcccagaaaggattgtgactataataaaatgggagaataaagttttacattaaaatataaaattatattttgaatctagaagagtgtatgcaagattttttaaagtgcagatgagttttctaatattatcgaaaggcttccatctcattcactgtactgaaactgcttttgtgacttcatgtctccaaatgtggtgttcacttcttagaaactagacatatcactcaaacatatcctcttttttttcatacttttttttgtttgtttttgtttttgtttttgagacagagtcttgctctgttgcccaggctggagtgcagtggcgcaatctcggctcactgcaagctcagcctccctgcaagctccgcctcccgggttcacgtcattctcctgcctcagcctcctgggtagctgggactacaggtgcctgccaccacgcctggctaatttttttgtattttttagtagagacagggtttcactgtgttagccaggatggtgttgatctgacctcgtgatcctcctgcctcagcctcccaaagtgctgggattacaggtgtgagccactgtgcctgtcccatatcctcttttttgaaatactttttctcttggcttttgctaacaccatactctcttggttttcttcctatttcaatccattgacttgctacatcttctctgtctcagctgactcctccgcatatgttccttcacatgttggttgcacgaagaccctgtcttggtatctcccaccctcttttctctccagctcaaaatgaccctatctagtcccatggctaaagaaaacatgacttctgcctcttcccagagtttttatatccaactttctacttaacatgtccagttgcatgtctaataggcatcccaaatttagcagatccaaaacagagctcttttcaatttttattataaaaatttcaaatgtacttttcatgtacttgtgacctagacttagtaattatcaagattttgccatattttcttttctattttattttcttcccccatccaccttgctgaagatccaccttgctgaagatccgccttgctgaagatatattattttaccttcatatgtaagcctaaaaagcgattgacattttcttatataaccaaaatgccattaggtaatttaataatattgactgttttttcggtattaatctaatatatagtccatattttctttgttttaaaatgtctttttattgttatttgttcaaaagatgatccaaggacacctctgccttgtatattttatgccttatacctagaattctcttctctcacttacctgtaaagcttaccttctcattttatttagctctcttttcaaatgttgcctaccaaagcagcattccctgaacaccctaattaaacagcatgccacgcctggtcagtatctttctccttacattattattattattgatagtgcttactatctggcattataattaacaaaccaatttatttgttcatagtctacacttttgcccccctgccttggcatattggaccaaaaaaataccttcacaaatttattttttaaatttactatcaacaggaatgcctgaaacagatgtggcactttatgaattattcattgatgagacaaagagtatattatgtgttagattaattattattattattctttgatatggggtcttgctctgtcaccaaggctggagtgagtggtgcaatcttggctcactgcaacctccgtctcccgggttcaagcagttctccgctgcagcctcccgagtagctgggattacaggcacccaccaccacacctggctaatttttgtgtctttagtagagactgagtttcaccatgttggccaggctggtcttgaactcctggcctcaggtgatctgcccgccttggcctccaaaagtgctgggattgcaggtgtaagccactgttcctggcccaacatttttttcaagtttaaacatacctttgttctctgctttcgtacttcattggtgatctgagtggatacaggattctaggttggacattattttcactctgtagttttttgtttgtttgttttgagactgagtctcactccgtcttccaggctggagtggagtggcacaatctcagctcactgcaacctccacctcctgggttcaagtgattcttgtgcctcagcctcctgagaagctgagattacagtctgcaccaccatgcctggctaatttttgaatttctagtagagacggggtttcgccgtgttggctaggctggcctcgaactcctgacctcaggtgatcctcccaaagtgctgggattacaggtgtgagccactgcaccccacccactctgtagttttcaaggtcttacacaaatgttttctagtattcacttcagctggtaagactgttgccagcctaattactttttgttattatataataactttaattacttttgtgaattacccctagatttgtgcttaaatttttattttttatttttttatttttttatttttttgagatggagtctcgctgtgccacccaggctggagtgcagtggcacaatctcggctcactgcaagctccgcctcccggattcacgccagtctcctgcctcagcctcctgagtagctgggactacaggcacccaccaccaagcgcggctaatttttggtatttttagtagagacggtgtttcactgtgttagccaggatggtctcgatctcctgacctcatgatccgcccgcctctgcctcccaaagtgctgggattacaggcgtgagccaccgcacccggcaaatttttgtatttttaagagctttattgagatatgatcagctgtacatatttaaagtgtactatttgatatgtttaacacatgtaaacatacacaaagtcatcaccacattcatgatgataaaatatcaatcatcccctaaaagtttgcccatgtgccctctcattccttacacatcaccctcaaccccagtcaaccaatgatctctattctgtcactataaatcagtttgcattttctagaattttaaataaacggaatcattgactatgtatccttttttcatttggctttttttactttaaattttacttagaataattattttgggattcatgttgttgagtgtatcaataatttattactttttattgctgaggagcatttattgtatggataaatcataatgtttatctctgttcacctgtcagtggacattgggttgtatccagttgaggactattacaaataaagttgccatgaatattcgtgttgcgtctttgtatgaacatatgcttttattcttttttgataaatacctttgagtggaatgaatgggtcatatggtaggtacctgcttaactgttaagaaaccagttgttttccagtatcgttgtaccgtttaacattcccagtgttagtatgtagaaattccagtgggtccatgtcctcaccagcatttggtgtggtcagttttttttttttttaaagacattctaacaggcatctagtagtatcatgttgtggttacatttcctgccccgttaatttttagatattcatctgtattctggaaacttcctgaactctcatattcattcaagtagcttttttttttccttaagattttataggatattctatgtaaataatcaagtcatctgagaattaagttagttttacttcttttctagtctggattccttttatttcgttttcttgacttatttcactggttagtattctattataagattgaatagaaggagtggaatcaggcatccttgtcttgttctgatcttagaaggaaaacagggtctccctctgtttcccagattggagtgcagtggcacaatcatagctcactatagcctcgacctcctgggctcaagctatcttcccacctcagcctcctgagttagctgggaccataggtgcatgccaccaccccagcaaatgtgtttgttttttgtagaggtggggtctcattatgttgcccgtctggtcttgaactcctgggctcaagtgatacctcccacctcaacctcccaaagcaaagtgctgggattacaggtatgagccgctgtgcttagctaagaacattgtctctttctatttagtatgatgtcatcagttttttcatggatgcttgttgtcaggttgaggatgttctcctctattactaacttgctaagagctatcatgaatcattgctggattttgccaagtgtcttttttttttcctgggaaatgtctaactataattccatttatttagtaaaaataaactattcagggtatctatgtcttgagtgaaccttgtttaatatgtgtgcttcactgaatttattttatgtaaattattgaatttattgacataaaattgttcataatattcccttatgtttttaagtatctgtagaatctgtagtgtatgttactgtgtttctcattactgatattggtaatattttctccatgttttttcctgattagtttggctagaggcttgttaattttgtcttctccaagaaccaacctctggtctcattaattgtctccgttgtttttctgttttctatttcattgatttctgctaatatatttattatttgagtcttctgcagactttgggtttcatttgctctttgttttgtaattttttgagtggaagctgaggtcattgatatgagaccgttgtcttttctaaaatagaggtttctttggtgctgtaaattttcttctaaatattgttttagctgtaatccataaattgagatatgttgcatttttattttcattgagttcaaaatactttttaatttattttgtaatttcttctttgaccatctgttatttctatggccatctgttatttcttagttttccaacgtatctttatgttaatgatttctgatttaattccattttggtcagagaacatactttcaatgacttgtagtcttctatttaaatatattaaggtttgttttgtggcccagaatgttgtctctattggtaaatgtttcttgtacacttaaaaaatgtatattttgctgttttttagttgttacaagcatgatgataaacctggtccatgtgctgacatgttgactataagtggacattttttttttttttaatttagatgtgctcacatactataaaactgacgcatcttaagtgttcaattcggtggtttttagtgtatttgtaaagttgtggagccatcaccactatttaattcctctaattttatcatctgaaaaagagtaccaattatcagtcaccatttcccctctatttagcagttagcaatcactaatactttctgtctctaccaatgtgcgtattctgacatttcatataaatggaaccatacaatattggctgttaatgtaagggttctttcacttagtgtaatgttttcaaggttaatccatgttgtagtatgtgtcagtatttcattcctttttatgattgaataaatatttcattgtacacatataccacatttaatatttcattgtacagatataccacatttaatctgttcatcagttgttggatatttgggttgtttccattttttggcaattatgaataatgctgctgtgaacatttgtgtacaaatttttgtgtgttgtaagttttcaattatcttggctgtatacctagttgcagaattgctaggtcatatggtaaactgatatctcactttttgaggaggtatcaaaactgttttccaaagagctgtaccattttacatttctgacagcaacatacagggttccagtttcttgacatccttgccaactcttattttctgtttctttaaaaaattattataatcatcctagtggatgtgaagtggtaatttgttgtgattttggtttttatttctctgatgactaatgatgttgagcatctttctatgtgcatatgaaggtatgagtcatttacataccttctttggagaaatgtctatttaaatcctttacctatttttaattggattgtttgtctttttgttgttgagttgtgtttgtatattctgggactcttgtcatgggactcttatcagatatatgatttgcaaatatttcccttcattctatgggttgtctttttgccttcctcatagtgtcctttaatgtacaaaagtttttaattttggtgaagtctaatttctttttgctgtttgcttgggctgttggtgccgtatttaagaaacttgcttaatcactggtcgtgaagatttatacctgttttcttctaagagttgtatagttttagctcttctgtttagatatttgatctattttcagttaatttttatatggtataaagtaggggtccaaggtgtttttttttgttttttttttggtggcgattatctagttgtctcagcaccatttggtgaaaagacttttctttcattgaatggtcttggatctcttgtcaaaaaatcacttgaccataaatagaagagtttatttctgaactcttaattccattacattgatctgtatgtgtttgtttttgccagtgccacacagtcttgattactgtagttttgtaataagtttttctagttttattttaggtgacttggttttatgcctgtgaacactaaataaattcaaataagtaaatttacacagtgaaacttaatggctcagacatttcattgtaaaatatcagaacattgtgtttactaaatgacagtcaatatttaacgctttattttgaatttttttagagcagttttaggttcatagcaaaattgagaggaaggtatgggaatttctcatatatcccctgcccacatacttgcatagcattttccattatcaacatcttccacctgagtggtacatttgctgtatttcatgagcctacattaatacatcataatccatccaaagtccatagtttacaatagggctcactcttggtttcaggcatcttatgagtttggacaaatgtatagtgatatatatccaccattatagtatcatgtggagttgtttcactgccttaaaaatctcctgtgctctgcctatttatcacccaccttctgaactcctgatgaccactgatctttttatagtctccatagttaagccttttccagaatgtcatataattggaatcacatagtatgtagccttttcagattagttttctttcacttagcaatatacatttaggtttcctctatcttttcatagcttctagctcatttctttttagagctgaataatacttcattctgtagatgtaccacagtttgtccattcacttgctgaaggacatcttgggtgcttccaaaaattggcagttatgagtaaagttgccataaacgtttgtgggcaggtgttggtgtgcacatacgtttacgttcgtgtgcaggtgtatgtgtggacatacgttttcagctcctttggataaataccaaggagcatgctgtattgtgtatgtttagtttttataagaaatcaccatttgtccttcaaagtgactgtacaattttgcattcccaccagcaatgaatataagttcctgatgctccacatccttgccagtatttgatgttgtcagtgttctctattttggccattctaatagatatgtagtacatttccctgataacataggatgtggattatcttttcatatgctcgtttgcaatctgtgtatctttgctgaggtgcctgttatggcctttggctcatttcttagatgtttcttattgtagtgttttaagagttctttatttattttagataacattactttatcagatgtgtcttttgaaagtatttcccctgtcttgtcttcttgttttcttgacattgtcttttgcagggtggaagtttttaattttaatgaagtcagtcttatcaatgatttcttttatggatcttgccttggtattgtacttaataaattatcaccatacccaaggtcatctgagtttttttcctatgttatcttctcagaggtttatagttttgtgtttatatttaggtctgtgatctattttgaattaatttttgtgaagggtgtaagttatgtgtctagattttatttttatttttattttttttgcatgtgaatatccagttgtagcagcaccatttgttgaaaagactatctgcattgtattgactttactcctttgtcaaaggtccgatgatcgtgtttatgtgggtctgtttctgggctctgaattctgtttagttatctgtttgtctgctcttttgccaataccacactgtcttatttggtgtagccttacagtaaaatttttattattatttatttatttatttatttttttgagatggagtctcggcctcttgcccaggctggagtgcaatggcgcgatctcagctcacggcagcctccacctcctgggttcaagtgattctcctgcctcagactcccgagtagctgggattacaggcacgcgccaccattcccagcttatttttttgtatctttagtagagatggggtggtctcgaaccaccagccaggctggtctcaaactcctgacctcgtgatcttcctgtcttggcctcccaaagtggtgggattacaggcactttatagtaagtcttgaagttgggtagtgtcagctgtcttgggattctccacttatctttctgttactgattttagtttaattccattgtggtctaagagtagacactgtatgatttttattcttttaaatttgttaaagtgtattttaaggcctcaaatatggtctgtcttggtaaatgttccatgtaagcttgagaagaacaactttgttcttctcccttaatatgtgttggctagcccgagtctttggcatctcttataaactttagaatcagtttgtcaatacccacaaaataatttgctgagattttgataggaattgcattgaatctatagaacaagttgggaataattgacatcttgaaaatactgaatctttctatttattaatatggaatagctcttcatttatttaattctttgatttcttttaccagagttttataattttcctcatagaaatcttatacatatttcattcaatttatacctaagtgtttcatgttttggagtgctaatgtaatggtattgtgttttaaaattcaaattccacttgttcatttctggtatttaggaaaataattgactttttaatattaaccttgtatcctattactttgctacaatcacttattagttccaggagggttttattttgttttgttttgtttgttttgaaacagagtcttgctctgtcgcccaggctggagtgcagtggcgcgatctcggctcaatgcaagctccgcctcccgggttcatgccattcttctgcctcagcctcccgagtagctgggactacaggtgcccaccaccacacccggctaattttttgtatttttagtagagatggggtttcatcgtgttagccaggatgtcttgatctcctgaccccgtgatccgccctcctttgcctcccaaaatgctgggattacaggcgtgagccactgtgcctggcctccaggagggtttttaaaattttattttccatatagatgatcttgttatctacaaagaccgttttatttcttttccaatcttcatacttttcctttgcttttccttccttttcttgtcttactgcattagctaggacttaaagtatggtgttgaaacgaagtggtgagagaggacatccttgtcttgtttttgatattctacaggttgagtgtctttaatttgaaaatctgaaaattgaaatgctccaaaatttgaaactttttgagtgccacatgatgctcaaagtattttggatttcagaaatgctgtaaaatttcctctgagaactactttgttgcacctcacagattttaattagtcttgttttgatttcattgaattcagaatcttttaaaatttctcttgagatttcttctttgaccgatgtgttattttgaacttgtgtgtattttgggattttccagttatctttctgttactgattttagtttaattccattgtggtctaagagtagacactgtttgatttttattcttttaaatttgataaagtgtattttaaggcctcaagtgtggtctgtcttggtaaatgtttcatgtgagctttagaggactgtatattctgctgttgttgaatgaagtagtctataaatgtccgttatattcaggtaattgatggttttgagtttaactgtgtccttactgattttctgcctgctaggtctgtctgtttctgatagagggaattgaagtctccaggtatcatactagattcatctgtttctctttatagttctgtcagtttttatctcacatatttcgatgctctgttgttaagcacatacatgttagggattgggaaactatgttgtcttggggaaactgacctctttatcgttatgaaatacccttctttttccctgataatttttcttgctttgaactctggtctgtctgaaattaatgtaactactcctgttttcttttgatttgtattagtatgatatatttttctcaatccatttacttttaatccatatggatctttatatttaaaatggatttcttgtaaacaacatatatttggatcttgttttttgatccactctgacagtctctgtcttaatttttaggctgggtgcggtggctcacccctgtaatcccagcactttgggaggtcgaggtgggcgatcacctgaggtcaggagttcaagaccagcctggccaacgtggcaaaactctgtctctactaaaaatacaaaaattagccacgcatggtggcacatgcctataatcccagttacttgggaggctgaggcaggagaattgcttgaacccaggaggcagagggttgtagtaagcggagatagcaccactgcacgccagcctggcgatgaagcgagactccatctcaaaaaacaaacaaacaaaaatgttgccaggcgtggtggctcacatctgtaatcctagcactttgggaggccaaggcgggtggatcacctgaggtctggagttcgagaccagcctgggcaacatggtgaaaccctggctctactaaaaatacaaaaattagccaagcatagtggctggcaggcacctgtaatcccagctactcgggaggctgaggcgggagaatcgcttgaactcaggaggcggaggttgtagtgagctgagatcgtgctgcttcacttcagcctgggcaaaagcgtgaaactctgtctcaaaaaaaaaaccaaaataataatttttaatttagactattgacattcaaagggattactggtatagttggattaatatttcctatatttgttaactgtttctgctttttgtctttgttccttgttcctatttttgttttccattcttctgccttttgtgttttttttgtttctgtttttttttttttcccttttgagatggagtctcactctgccacccaggctggagtagagtggttcaatctcagctcactgctacctccgcctcccaggttcaagtgattctcctgcctcagcctcctgagtagctgggatgccaccacacccagctaatttttgtgttttagtagagatggggtttcaccatgttggccaggctggtctctaattcctgacctcaagtgatccacccaccttggcctcccagagtgctgggattacaggtgtgagtcaccatgcctggaccttttgtggttttaattgagcatttcatatagttttttttttctccttccttagtatttattagttacacctattttttaaactttttaattatttgccctaaagttttcactatacatgtacaacaaatctaagtccactttatttcaaataacactataatgattcacagggagtgtgagtacaaagtaattttaaatcttccatcttataccttgtactatttctgttattcatttcacttatttataagcactcataagcatatttttgtatatgtgctagatataagcatagatgatcaaatacattgttgctgttattttgaacaataaaataatttgttagctcaattaagaataagtaaaatgaaagtttgtgttttatcttcacttattcctccttcagtgctccttctttctttatgtagatatatgtctctgacctatgtttattttccttttctttaaagaactccttttgtaatttcttgcaaagtaggtctgctggcaacaaattccctcaatgttaatttatctgagaaaagttttatttctcctttagttttgaaggataattttgcggggtacagtattctaggttggttttgctttgttttgtttccgttactgctttaaatatttcactcttcttgcttacatgatttctgaggagatgttggatgtaattcttatctttgctcctctatagataatgttttttcctccagcttctttcaggattttttcttatctttgattttctttagtttgaaaaatgcttgcctagctgtagttctttttgtatttatcctgattattgttctctgagcttactggatctatggtttggtttctcacattcatttggaggaaattatcagtcattattatttcagatattctgttcttttctccttctcctctggtattcacattatacatgagttatgccttttgtagttgtcccacattccttggacattatgttttgttttgctttttttcagtctttgttctttttgcttctcagttttgtacgtttttattgatatatcctcaaggtcagagattgtttcctcaattgtgtctagtctactaatacgcccatcagaggcattgttcctttctgttacattgtttttgattgctaccatttcctttttattcttaggatttccgtctctctgctgacattgcccatctcttcttacatgctgtctactttatccattggaactcttagcatgctaatcatagttgtttcggattcctggtcttacagttccaacagtcctgctatgtttggttctgatgctggctttatcccttcaaattgtatttttgccttttagtatggcttgtaatttttcttaataactggacatgaagtacttattaaaagtaatggtataaataggtccttaggaatttactggtaaagtgtaggaggagaggaagtgttctacaggcctatgattaggtgtctgtcacttaaagagcctatacgtctgaactgtgggcttcacaagggattatcagcacctcctattcccaactgaggtggaacaggttagtagattaggctggagttatgtattttccttccccaatgcggaaggctggaattgggtatttctgtttgtctaggtcagttaggctctaataaaacctcagtgggtaggctgtggtgaaatagcttttcttaagggcagatcttgttaagaaagttagagtactctgggatacccaaaatggtttctttttccctccctctgctggatgtacaaggtgattttaatctgaaatttattgtgaaaatctggttgagctctgaagttaaaatcaaatcacaaaaacaccctctgcaccatacccccaccgcatgactgggttccctggagtttttttcttttttgagacagagtcttgctctgtcgcgtaggctgggtgcagtgacacgatcttggctcactgaaacctccacctcttgggttcaagcagttctcctgtcgggaggctgaggcctcccgagtagctgggattacaggcgcatgccaccatggccggctaatttttgtatttttagtagagacggggtttcgccatattggtcaggctggtctcgaacctctgacatcaggtgatccacccgctttggcctcccaaagtgctgggattatagacgtgagccaccgcgcccggccttccctggagtttttaacattcagacttaacgctttctgaacctccaacaattcatcaattatagttcaggttttcctaccctagctctgtttctcacagaggtttctgctcatgagtctgtgctctggtaagccaagactccttgtgtttacctgttcatctctgcaatctagggggtagcattttgtcctgtgtccttacctctctgaaggatccaagatcagttattgattttacagtttgttaactttttatttgttgttagtatggagtggcaactgctaagcttcttacgtgtggaactggaaactggaagcttgtttttttaatacatcaactattaaatcaagcttgtctaacacacggcccgtgggctgcatgaggcccaggacagctttgaatgtggcccacataaattcataaactttcttaaaacattatgagatttttttgctatttatttttagctcatcagctattgttagtgttagtgtattttatgtgtggccggagacaattcttcttcttctactgtggccaagggaagccataagattggacacccctatgttaaatactttttaacgtataacctcattagtggtaaaaattttgtaccgccaggtgagtgaaagatggcatattttcttttatgtccaatttgcttatatttcttttttgctttctctttaggttaatacaatctgttggaatgacactggagaatatattttatctggctcagatgacaccaaattagtaattagtaatccttacagcagaaaggtaaagtagtttaaaaaatctgtaatttaatgagagaaaaaaaatcaagaaggcagaaatgaagaaactgtgaacagtcatagaatgggcatttatattagaatatcctccctattttgctgaggtttattgtataatttagaggttcttaggtacatgtgggtctcttagattacttagggaaacaagattttattcagccttgggatctagaaaatttaaatatactttatttaaatggttaataattggtacaagtgacattatttcaataacattttttgggggaaaatgtgccataaataaagtatgagttaatgagaaaattacttttatgtgttaccttaatatattatcttaacattctaaaaagttacttattttaatgttaagaatagtgtgggtaaagctgccaactttggtcattgtttcgttttcttaaaaatttgaaatttagtcttttagaaaatttacatttaaaacttttaaagacaaaaacagccaaatgactgcggtgtgaatagttcttgaggtactgagaaaattaaaatggtttcaatgaagaaaaaaattaccataagctaataaactccctcactagaaggcaagagatatctaagaattaaataattttctaactctcaagtaactttaattactgtttcaaatagcattccattttatccacagaatgtttcctttacaaggatggtttcagagaaattaagatactgaatgataaagctataaacagctgactgattgtaataaaaagaaagtgtgtgatgttctttacacttgacataacagttaaatgagaaaccttctgttttagaaatatgactaaatagttattttaaaatttgtaagatcttaaacattcaacacatcatttaaagttccagttaagaataggaatatgtatatttcctagctgcctcccaactcacatgatacatttttctctcctgattgtcttaaatttcctgtatctttttttttttttttttttttttttgtggcaaggtctcactctgtcacccaggctggaaggctggagtacagtggtgcgatctcggcttactgcaacctctgcctcctgcgttcaagcgattctcctgcctcagcctcccaaggatctgggattacaggtgtgtgccaccatgctcggctaatttttatgtttttggtagagacagggtttcaccatgttggccaggctggtcttgaactcctgacctcaagtgatctgcccacctcatcctcccaaagtgttgggattacaggcatgagccaccacgcccagcccaaatttcttgtatctttaagtcttttaacatctattattttaatagtaattccaaaaatgtactccagcttttaattttttatggtagtagcaaccgtgtattggtgattgtatcagtcgggttctagtcaaagaaaccacacagtaatttcaatagggaaagtgtaataaaaagaattactacctatatcaggagattggagtagtaaaggcttggctgctaaaaagtaaaaaggtctctataaaatacagaaataacagatactatgaaccgccactaaccctgggactgagataaaccactgaaaagaagagacccccccgtgctgagtgctgagatttagaccttattgaagagggtgtcatggctcactggatggcagggaagtctctgtgatgtcatgctagtgtaacttgttgcgaattcccctctggaacttggtggaacacctctctctagagcactgagaaatactttttaaggagaggtttctcatcagaggtagtatgctacaaaatgtctagggacgtggggaaatgaggcaggagaagctgtcgggtgttgaactgttcatttagtaggtgggccctggtgaaactgcaggactctggtgctatggtgttggggaaactgcccgtgctggaagaccctggcactggaaaacctgtgcatggttgcaggagctcccattagagataggaagcaaactccgttttcctgcattattctttcagtgctttttactggcaaagcttaacatcatgccaactggcaaaggaaaaatatttgaaggactcagttccattgcataatctataaaagtgaagggtaaatttggaactgagaggaaataatttgataagtggcacagtagtcttacctttatctgcttcttggtattattgcaatgtgaaatttacttcattaatatttaggtctttgaatgaagaagagttccatgaaaattttaaaattatattatgattactataatggcaaatatagatttatatgttggtttttttttaccattctgaccaagttatttaaactttccttagcctttttcttcatatattaagaaagtcattatgtctaaagtcctttctaatattaatattttatatttgtttctaaaaatgttttaaaacatttttgtctattaatttaggttatatagtgatgtttgaatgggcctggctggctgtttgaagctggatcttacaggttatgacttactcttttaggctcatagaatgtaatcttcagccaagtagtttaagaaactggatttttatcagtttacaaacagtggctaggttctagtgaaatgcttcatgatatacaattcgataagctgggataacatatgagttctaattaggttaggattatgttctgattttcattggcttttagcttctgagttcatatatagaggaagtatacagctgtttttatatctgaaaacatggtattagcagtccaaagtgtaatttaaaattttcagttttacagaataaattgtttatttcttgtttttccacacttaataagatatttaaataagtgtgtatcatctatcagctgaaaaagaagttcatattgaggctgtctttaatgggtcgtagttttatttcattaagttttacttaattgtcctggcttagcaaaaaaagcttgatgttttcaaatcctacttctcttaggtcagtaattacaagggtaacacttttcattttattttttattattcttttttgagatagagtcttgctctgttgcccaggctggagtgcagtggcacgatctcggcccactgcaaactctgcctcccagattcaagagtttctcctgcctcagccttccaaatagctgaggctacaagtgtgtgccaccacgcccggctagtttttgtattttttgtagagttggggtttcaccatgttggccaggctggtctcgaactcctgagctcaaatgatccacctgtctccacctcccaaagtgctggggattacaggcgtgaaccattgcgcctagcccccttttcttataatagagaagatttcctgaaataatgtatatgtagaaagctttttgacgatcactattcagaattttaactcttacattatacaaaataatcacttgggtaccaaaggaatgattgttaaaagacctgtttctgttttatttgcttatttttaaagaaatgacgatccctttgatgtatgatttccaatagaatatgtatatttgaaaaaatgatactctttctcatttccagcttgagaaatgattagtcagattttctttttaaagattataatcataggccaagtgtgtggctcacgcttataatcccagcactttgggaggcccgaggtgggaagatcgcttgaggccaggagttaaagaccagcctgggaaatgtagtgagactctgtctctacaaaaaatttaaaagctggatgtggtggcacatgcctgtagtcccagttactcgggagggagtggcaggaggatcacttgagcccaggcgttccaccactacactccaagtctggatgacagcaagagctgatatcttaaaaaaaaaaattattatcataagcctttatagggctttttaaaattttaaaacaccaatgattcattatataggaaaaaaagctttttgaccatgagtcaaatactacctgtttttatagtttgattatttttagatcctatgattttgtgggaacattaatttattgaaaataagagttttgaaacacttagttttttaaaaaaatagatttaagagactggagatattccttattaatgcaattatattttaattatatatagcatagagactccccatcatatactggggagtcccattagggtaccctattatggcataggtgaaagagaaggaagcccagagatggtcttgcaatatcttttgtaaaataaattccaaatatatactgtatacatgatttttcttgatttggcctcagccagctacttatagtcctcagagcttaaaaagttttcattactgtgtgcttttgcttatactcttctttctttctgagatcacctgctttctcgggtatctcccatctacttggtaaatttaaaattcattcttcaaatctcagctcttttttgtgatatttctctaacatttcctggacacatgtagccactccttcatctgtgttcctgtcttgtggataactctattattatattgtattatatttgtttgcatgttgtgcttagatggcaacttctttgagataatgacaatttcttttttctttttgcatcctcaacacttaacattatttatttacctctcatatagttggagcccactaagtcttagtaaaacgagtgtataaatctgtatattcgatacctcagacagggttatgggtcaggtttgaaagggggttgtttttaccaagggattaaaaaaccatcctctactatttggatacttttggactgagcttcaagttttgggagtgttgtacgtgacatgattaagaaggaaagagatgccaactttggccagctatttagtcaaaataaactggtaatcagcagaatgacagatgttacaactagaccaccttaacgtatagtaatcattgcaattatcaatatgttattttcatctcagattaagttactctggcaattatacctctctagggcattatccttagggtgttttcagaataactcataatgcattgatccaaggaaagcacaactaagaagataaatccatcaataaaaagttattattgttattgtaatttttttttttgagacagagtcttgctctgtcgcccaggctgcagtgcagtggcgtattctcagctcactgcaacctccacctcccgggttcaagtgattctcgtgccttagcctcccgagtagctgggactacagggatgcgccaccatacccggctaatttttgtatttttagtggagatggggtttcgccatgttgggcaggctggtctcgaactcctgacttcaggtgatccagctgccttggcctcccaaagtgctgagattacaaggcatgagccgccatgcctggcccagctatcaaaaattataacttcccaagtacacataaatatttttaatcagccttattgctgtttatctgcagtatcatacatacccatattggctgtatagatttggtttcaacaattaaagaacaaattctaaccttcattgaaattaccaactatacatacataacacgaataataattctttgaacaattattcattaataaattagagagtggtacaaaatgaagttcaaatgataggaatcagataagcttattaaggagtttacattttagtgtgatttttgtggacagtcactgtagggttttaaacatgtactgatatgatttatatttttaaaagatagctctggctgcttttggagggtagagtttgaactagattggaagtaggagataggaggccattgaaataatccaggtaagagggaaagatgactcaggcacagataatgacattggagttggtgaaaagtaatttgggatgtattttggcatggctctgctggtggatttgatacagcagatgagggaaagaaaaatgaaaaaaggttccttagtttttgacttgatcaactgtatgggtggatactgatgccattgagatggagaacactggaagaggggagtgtattttgagaggggcatctgaaatctagagatttgttcaaaggaacgggcccccaattttttactcactaaattttaattagtttatttaataagggaatgcttttcaatttatgagtgactgatgaagcagtgaggctcctgcttttgttactgaaattataaataaacctcttaagtggaggtaaatcataaatttttaagagtaatgtctgctgaatgttactaatgcacagccaaagccaatggcctaacaaacgaagtaactaatggctgtatgtagtgtgtagttagctacttggtaaaccaccctaaatctctgacagcgttaaagaacatgatatttatcttgtttaaaggctttacgttaattactctctctgtttcatgacattgacatgtcaggctagttattttacagaatgttgctccatttggatttgtctgattgtttcttcatgagtagattcagattaaacatttttggtgagaattctcaggtgatattgtggtacatgatgttatataatttattcccttattggagatgttgtttgatccctctattttgggttaccctttgtaactaacaagctgtctgtgaagtggcatgttgagactgaatattctttcctaacagtctttcccccagtggtttttatattaattgatgacttctgtttgaatcggttgttgtaatgtcacaaaacagtgatttttaaattgtcatttcttctacatttattaatttacattcttcagtaaataagagcattttctctgtccctagcaccttaaacatttttttaattcagtgttttatagtcaatcactgatgttattctttttgatactcaaattgtcctaaatttgttccatggagatttcaagccaacttagtgttggtgttttgacatttctcttttttcttagcactttaaaaaagcacaacagatattccccactcacctctctattgtatatctgttatggggatatactgtagtttattcaaccagtctcctgtgttttactgttataaataactcagtaaataatctttgacattttttttggtcttattggaagcatatctttggggtaaattcctagaaatagatttgcctagtcaaagagtaagcacatacgtagttttgtgagatattgctaaattcccttccactggtattaccgtttagcattcctaccaacagtgtttaagagtctgttttcacataagcttgtttgtagagtctgttgtcaagctcttgaatttttgccagtctgttaagtgagaattgatatctcagcataatttcaatttgcatttcccttatgaatgatccaagttgagtattttttactatttttaagggccatttgtatatctgcatgtatactgtctgttctggtaccttgcccattaaaaaaaaatcaggtcttgtcagttatttttcctctcaattttaaaacactactaggagaattagtcctttatctgcaacaaattatacaaatattaaaatatcaattttaaactttattactgtcacagtaattctggtcttttaaatattattaattggatgtagggacttctgctgtgtcttatgtgtaccatttcattactttgattttatgaaaataattaaaattcagtttattgttttgtcatcctgaaagggaataacttaatcatttagcatacagtaaatttcaaaagtcagtcaaagtagttcgttgttatttattgagattttatgagtgagtcagataaactaaataaatggaaatatgcatgttttattttcatgatactgttcctgttgatggtactcaatcttattcacatctcacagggaacaaaagaaaatatatgggattctgatttttttaaattataatagcttgcagtctagtgataatctttcactgagatgagaatgttaatgagaatgtattactggctatgattatattaaaaatgaatatttctaggaaataataagttaccattaactgctttctttgtgtgttttaggttttgacaacaattcgttcagggcaccgagcaaacatatttagtgcaaagttcttaccttgtacaaatgataaacagattgtatcctgctctggagatggagtaatattttataccaacgttgagcaagatgcagaaaccaacagacaatgccaatttacgtgtcattatggaactacttatgaggtatggtattattatgattatatgatatatatgtaagtatgtatatttttgattaagtacatacatgtgtagatgcatgtgtgtacatgtacagatgtgtgtgtatgcacatttgatgcatataaattattgacaatatctaggtgtcagcagagcatttgagaaaatgtatcttgataggcttctggataaagttaagaaataagatgcaagtaatagtactctaagatgggtttgtaattgcttgagcaaccatgctgtaagcaaacagacgtttacctttaaagatacctctgttattgtgctgcatgactgtactaggctttacccttttaaacaatcgcttgcttgtgtaaagtcatagccaacatgcttatcaaatttttgtaggatagaagggactccagtagacaaaagaatcagattcctaaaggatattaatgagcttaagacctgagctgaattaaataaggtggaataaatttaagactcaattttagtgctttatgtggttcagaaaaaatgtacaactgagttctcttttatttatgatacagggtcacactgtcactcacactggagtgcagtggcatgaccatggctctctgcagcttcaaactcccaggctcaagcagtcttctcacctcagcctcttgagtagctgggactacaggcatgtgccaccatgcccaactaatttaattttgttgttgttgttgtggagacagggttttgctatgttgccagggctggtctccaactcctgagttcatacaatcctcccaccttggcctctcacagtgccaaggttatagatgtgagccactgtactagcctccagagtgttcttctgaaatacttgcatgtcatttttttgtatcaaattattgataggtttcccattttttgtgttaaactggtatactttttccatcatttgaattccagttcttttatgtcctcatgtttttgtatgtacttatatatatagctagattttgttttcttatccagtctcacagttttggggttttactggagatttatgaatttacatttattgtgagttctgatatatttggatttgtttctatccctttgttttctactttttaaaaaaagtttccaatctccattaaccctcctctccttttaaaagtccacctttggaggccagacgtggtggctcacacctgtaatctgagcactctgggaggctgaggtgggcggatcacttgaggccaggaatttgagaccggcctggccaacatggtgaaaccctgtctctactaaaaatacaggaatcagctgggtgtggtggtgcacgcctgtaataccagctacttgggaggctgaggcttgagaattgcttgaacaacctgggaggcagaggttgcagtcagccaagactgcgctactgtactccaacctgggcgacagagtgagactgtgtctcaaaaataaaaaataaaaataaagtctacctttcgaattacttgagtattttactttttgtccattgtgtttctgtttcttgcttctaagatagacattcatttttgttattctggaggttaccccagctactttcacaagaatatcgaacaaagccaaatatcagtaaatatttctactcttctcttgaataaaggaacttggaacataccttgttccattttatgtgattatattgttcaggatttagttatattctgttttctctcatgaattagatgttattggtttactgttagtgttgtttgtttagatttacctgcatatttactaatacctttggtttacctttccttcttcccatcacacattttccatgttgtatcattttgtactgaaggtacatcctttagcagttttttttttttttttttttttttttttttttttgagacggagtttcgctcttgttgcccaggctgaagtgcaatggcatgatcttggctcaccacaacctctgcctcctgggttcaagtaattctcctgtcagcctcctgagtagctgggattataggtgcataccaccactcctggctaattttgtattttttttaggagagatggggtttctccatgttggtcaggctggtctcgaactcccgacctcaggtgatctgcctgcctctgcctctcaaagctctgggattacaggcatgaaccaccgtgcctgggccacagttttttttttttttttttacatgagagtttgttgatagaaaacaatttcagtttccttttctttccttcattcattctttcctttcttccttttctttcctttgtgaaaaatgtcttttttttttaaatgccagttcttcaaagatagttttgctgggcatggatttcatttgatagttactgtatttcagatggtattccattatattctgacttccattgttgaagttgcaaagtcagacatcagtctaattgtggttcctgtataggtaacctgtttcttttccttgactacttttaattttgtttttctttgccgggtttttttcttattttatgtcagaacagtgtgtcttgatgtgcattgttttttattttttatacttgggatttgttgatgttcttgatgtgagcaattggcatcttgaaaaatgtaagaaattttcagtcagtaggtctttggtttactacttcattattctctccatttttttgtagtctggggaaattctgattagccatatcagacctgcttattagaccttattccatccactatttaaaaattttaaaattgaaatatagaacatataggaaaagtacctaaatcctaagtatatggcttagtgaattatcacaaagcaaatctattcatgtaactaccacctagcacattaagtatcccaaaagctccctttattctgaattctaacactggagttttctgttttttctaatacccctgtttttctgtttttgaacgttatataaatggaaatatggctttttgtgtctttgttgttgtttttgtatctggctttttttgctgagcaaaatcttaactcatttgtgaaattcatccatgttgtgtgtaactataatttgcccattttattactgtatagtattccattatatgaatataccacaattgatttatctgttctatgctgttggaagtttggagaacattgttttacgtgtcttttcagtacacaaatgcacacatttgttagggtgtatacttagcagtaaaattgctgggtcatagaatatatatttggttattttagagataaagccaaatagttttccaaagtgtagtaacgacttacattcccaccaacagcatgtaagaggtcctgttgcttctgatctttgccaacagttggtattttcagctctactttggtggatgtatagtatcatcttaattggtttccatttgcctctctgtgctgatactactgaggttgagcatctcttcaaatgtttgttggttatttggatgtattcttaatgaaatgtgtagtcaaatctcttgcctatttttttctgttgggttgtttgtcttattttattttgttattattaatttataggagtttttgaaaaaatatcttctgcatatgagcctatcttttcctattctgtggttatattttcactctcctagtggtgggggagggtgcggtttgtgtgttttgagagatggggtctcactttttcacccaggctggagagcagtggcatgattatagctcctgggttcaaggaatcgtcttgcctcccaagtagctgagactacaggcatgcactactgcacctgggtaattttttttattttttgtagagacggggccttgctatcttacccaggcttgtctagaactcctgggctcaagcgatcctcctgcctctgcctcctaaagtgctgggatttcagcctaaaatggtgtcttttgatgaagaaaagtatttaatgttgtctaatatgttggtctgctcctttatgattagtatcttttgcatcctggttaagaaatcttttcctatcccaaagttatgaagatattcttctactttaatttcattgctttgtctttagcatttagatctgtaatctatctggatttgacttttgttatagtatgacttgagtcaacttttttttttaccccatatgaagttttttgtgttaacataatttattttttagaaaattaaatcaaaatccaaaacagcacacaaacaaaagaaagaccattttaacatgatagacccatttacccaagatgttttttgccaaatacatatacacactttaattagcatagaatttttttttttcaaaactgatactctgcatctatcaacagctctcctttcttccttatcctagtccctggcaaccatcattctactttctgtttctaagaatttgactattttagatacctcatataattgtaatcatgcagtatttgacttttgatgactgactgatttcacttagcatgatcatattgtagcatatgtcagaatttatttcctttataaggcaggagaagattccgttgtatgtatataccacattttctttattcatttatctaggctgtgtgctgtggctcatgcctgtgatcccagcactttgggaggccgaggtgggcagatcacttgaggttaggagttcaagaccagcctgtacaacaagatgaaaccgtgcctctattgaaactacaaaaattagccaggcgtggtggcaggtgcctgtagtcccagctactcaggaggctgaggcaggagaatcacttgaacccaagaggtggaggatgcagtgagctgagatcatgccactgcactccagcgtgggtgacagagtgagactctgtctcaaaataaataaacaggctgggcgcagtggctcacacccatcatcccagcactttgggaggctgaggagggcggatcacgaggtcaagagattgagaccatcctggccaacatggtgaaaccctgtctctactaaaaatgcaaaaattagctggatgtggtggcatgtgcctatagtcccagttacttgggaggctgaggcaggagaatcacttgaacacgggaggcagaggttgcagtgagctgagatcgtgtcactgcactccagcctggcgacagagtgagactccatctcagaaataaataaataaataagtaaataaataaattcatctagtgatggatatttaggttgcttctactccttggctattgtgaataatgctgcagtgaagatgagtgtgcaaatatctcttcaagatcccgtttccagttttttcggatctgtacccagaagtagagattgctggatcatatggtaattccatttttaagtttttgaggaccctccatactattttccatagcagctccactattttacatgcctaccagctgtgtgcaagggtgccaacttctccatttccttgccaacacttacaatttttttttagtgggcattccagtgggcttgaagttttatcttactgtggttgtgattttcatttccccaaagattactgaagttgagcttcttttcatatgcttcttggccatctgtgtatcttctttggagaaatctcctttgcttttttttaatctgcattattttttgttgttaacataggatttctttatatattccgaatattatgttgttaacataggatttctttatatattccaaatattaacccttttttagatacatggttcacaaatattttcacccgttccatggattgtctttttaccctgttaagtttgatgtagttccacttgtctgttatggctttgttaactgtgattttgttgttatatctaataaatcattgtaaaatccaatgtcatgaagcttttctctgaattttctttttttttttttttttttgagctctgtcacccaggctggagtgcagtggtacaatcgtggctcactgcaccctctgcctcccaggttcaagcaattctcctgcctcagcctcctgagtagctgggattacaggcgcatgccaccacgcccggctaattttttgtattttagtagagatggggtttcaccgtgttgcccagtctggtctcagactcctgagctcaggtaatctgcccgtctccgcctccaaagtgctgggcttacaggcatgagccaccgctcccggcctcccccatgttttcttctaggagttttatactttcagtttgtaggtttagatctttaatccgttttgaattaatttttgcatatgtagggtaagggtctaagttcattcttttgcatgtagataaccagttttcccagcagcttttttcttactttatggattcatttttttcctcaacttttattttagattcgaggggtacatgtgcaggtttgtttcataggtagtattgcatgaggctgaggtttggggtacaaatgatcctgttacccaggaactgagcatagtacccagtagttagtgtttcaccccttccttccctttctccctccctgctctactagttcacagtttctgttgttgccatctttatgtccacaagtatccagtgtgtagctcctacttataagtgagaacatgctgtatttggttttctgttcctgtgttaatttgcttaggataatagcctccagctgcatcttagttgctgcaaaggacatgatttcattcatttttgtggctgcatagtgttccatgtatatgtaccacatttgcttcattcagtccaccattgatgggcacctaggttgattctgtgtctttgttattgtgaatagtgctgcgatgaacatgtgagtgcatgtgtctttttggtagaacaatttgttttcttttggatatatacccaggattgggattgctgggttgaatggtcattctaagttctttgagaaatctccaaattgttttccatagtggctgaacgaatttacattcccaccaagtgtatataagtattcctttttctctgcggcctcaccagcaacttttgtttcttgactttttaataatagccattctcactcatatgagatggtatctcattgtggttttgatttgcatttctctgagattagtggatgtggagcattttattttgtgttcgttggctccttgtatgcctttggcgaagtgtctgttcatgtcctttgctcattttttaagggggttatttggtttttgcttgtttaattttttaagttcttttttttttgagacggagtctcgcttcatcgccaggctggagtgcagtggtgcgatctcggctcacagcaacctcctcttcctgctttcaagcgattctcctgcctcagcctcctgagtagctgggactataggcgcatgcaaccacgcccagctaatattttttatttctagtagagatggggtttcaccgcgtcaaccaggatggttttgatctcctgacctcatgatctgcctgcctcagcctcccaaagtgctgagattacaggcatgacatttttttaagttctttgtggattctggatattaaaccttcgtcaggtgcatagttggcaaatattttctttcattctttaggttgtctgtttactttgttgatagtttcttttgctgtgcagagctttttagtttaattaggtcccacttgtcaatttttgtttttgttgcagtggctattgaggacttagtcataatttctttctcaagtccaatgtctagaatggcgtttcctatattttcttttaggattcttatagttcgaggtcttacatttaaatctggaatccatcttgagttaatttttatatatggtgaaatgtaggggggtccagtttcattcttctacatatggttggccagtgatcccagcaccatttatttaatagggagtcctttccccattgcttatttttgtcaactttgtcgaagatcagatgactgtaggtgtgtggctttatttctgggttctctattctgtttcattggcctgtgtgtcttgttttcgtaccagtactatgctgttttggttactgtagccttaaagtatggtttgcagtcaagtaatgtgatacctctggctttgttctttttgcttaagattgctttggctgttcaggctcttttttggttccatgtgaattttagaatagttttttctaattctgtgaaaaatgatgttggtagtttgataggaatagcattgaatctgtaggttgtgttgggctgaatggtcattttaacgatattgattcttccaatccgtgagcatgaaataaatggaaaaacattgttgctgtttgttgttgtcattgctgtttgtttagtgattttcctagactaattctgttaaatctgcattctttttcaggtgtaggcactggagtctgttcttggttagcttagttgtcagctaagggttagatagagatttctttaaatgccttgaaccaataagccttccagtctttgtcaaaggggcctgtgtgtttgggttgccttcaagtgccttggaaatttacaactctgccttagctttcacttcttgcttgttcagagcctcaaggtcagccagagatgttagagtagggccttcttgggtccttctttggcatgtgcacattcttatatatgtgcataatttctaaattcccagaaatgttttgttgcttttcaaattctactattaatgtctaattcttacttttacttttaactttttctggtcagcttcttgtttccctcacctagtattactgcctcaagcaactgtgatgttaaatcattgctgttgattatttttgacaagcacccttaggatggggttgaatatggtcagattcatgtaagtccttaaaaggcagcttttccagggaacttaaggacagattaaattgtgataagtctttgaggatagggcatttgggggagtctcaaacttgttttgtgacttacagtggctgcgaagttactgttttttacaactaccatagtcgcaaggctgctgttgacttagggaaaataccacaagttaaagtggctcaaggctcactattctttctgagatccagttatttgtcttgaataaatgtttcttggattgttctaatcccttggttaaatttcacagttctaaaaaagttgattttgaaattttgtagtgttgtcagtgcttttatggagaagtatattttcagaggtcttattcagccattgcagaagtgcttcttctgtaacattcttacacttttcccctccttcttgaggaaggttaaattgtgaggaaaggttcctaaatgattcagatttctgaacatatcttataaaggcattaattataagaaatagatacatgttttaataatttaattttataatagtgtgagtacagctcatagttcattaatttgattatcaaattcagtattctagtttttaaaaataaatatccttggaaatatatgcttccaatgatttcatttatagacagtagtatacaaagcagaagtgatcattttacttaataaagtcatcaaagctaagtcaataaattacataaatatttcttactgataaaatagtttcataagtaaactgctgacttgattagatggaatactaattacattttcacaaatatgaaatgagtaaaaattctcattttccttgaaatgtatacttatttaggttgaatatactttttatatattttttgcagggtataaatcttattattctgtgttcattgcaaaattggttcaattgaagcaaaggacattaatagattgaagtttggtaaattaaaaattatgtatagttcattttcatgctgctaataaaggtatacccgagactgggcagtttacaaaagaaagaggtttattggacttacagttctgtgtacctgggaggcctcacaatcatggtggaaggtgaaaggtgaaaggcatgtctcacatgacagcagacaagagaagagagcttgtgtggaaaaactcccattttaaaaaccatcatatctcatgagacttatgcaccatcacaagaacagcatgggaaagacctgcccacatgattcagttacctcccactgggtccctcccacaacacgtggcaattcaagataagatttaggtgagatcatagccaaaccacgtctgtgtgtgtgtgtgtgtgtgtgtgtgtggtgtgtgtgtgtgtggtgtgtgtgtgcgtgcgcgtgtgcacgtggcttaaagtaacaaatttattatcttactgttctggaagtcagaagtctgaaataaggtgtactgggctaaaatcgaagtgttggcaagtgtgtattccttctggtcttgccttttccagcttctagaggctacttgcattccttggagcaagtccccttcctctatcttcaaacccagcaacatagcatcttgagatctctttctttttctctctttttccatcatcttgtctccttctctgactctgactctcctgccttgttttgctcagtaagacccttgtaattatattgggcctctgtggataatttaggataatctccttatggtcaaaatccttaattaatcacatctacaaaatcctttttgcagtataaggtaaagtattcgtaggttctaacaaataggatgtagatatctttgggctactattattctgcttaccacaataatagtaaaccttttaagacaaaagttttccaagtaaatttttaaaaagtataaaacacctactgaaaagtgctggcatcgtgtatttgtgcaacttgattaattttcacaaagtaaaatatatatgtactcagcatctagaacaagaaacagccccccataagtcctttgtaccccctcaaagggtttactgctttctaggctcttaaaagtacaggttagtttgggcctttttacgattttataaaaatgggaatcatactgtgccttctcttttgtgtctggcttttttcacacagaaggtttgtgagattcatttatgttgctgagaatagtaatgatttgttcattattactgatgatttagtactttattttaggaatagataacaatttaatcccagtttattgttggatatttgggttgtttcaagtgtttggctaatataaatagtgctgctgtgaacattctagtgcatgtttttacatgccccatgcaggcgtttatttttagtggaactgctgggttataggagaagcatatgatcagctttaatagatattgatacatagttttccattgcaattgtaccattttatactcccatcagcaatgtgttccgtaactccacatcctcatcaacacttgatattataagtcttttcattttggccattcgggtatggtatagctgtatatctttgtggtggtaatttatatttcctcgatggctgagtttgaatacctttcatatatacagtgtttcaaacataggaatattgtatacagaaaaccatgtatagcagaggcaccaggaactggtttcacaggagacaatttttccatggagtggggatggttttgggtttaaaactgttatacctcagatcaccaggcattagcttctcataaggagtgcacaacctgtgagaaacagttcaccatagtgtctatgctcctgtgagaatctaatgccattgctgatcctacaggaggtggagctcaggtggtaatgctcgctcacctgctgctcactacctgctttgctgctcacttcctaacaggctacggaccagtactgggtctttgggacatagggagagaagaacttattgaggcagggtttatagagagcctcaacttacaatattgtcattgctaaattagaagtggatacaggcatatctaaaatattgtacttcattaaaaaaggtttttattgtagtaaaatacatataaagtttgacatttaaactattgttttgagagtacatttcgttgacattaagtatattcatgttgtataaccattaccacaattaaaatttttctaagaggtgagttatgcacttaaatcatttcagcatcccacagttgtcttaaacgttaccagagaagaaaatttgcttacgtatttattgtacaattataaactcacatagataaaacataaaaattaagctttgaatagtttgaacaagctacctaggggagaatcattcttccctagttgttagaagtttataacttcagataactttttatctgaagttaagttaatgctaatcttcaaagtactgaatcatattaattcaacaattacttcttatctatttctatctgtattgtaccattctgaatcatagtatgggtaagccatgagtaactaaaatgcatggtttttgtaacctttaccttaatcattttatgaaatagtaggaatgtttttcagagccgtctgtttaaatgttcgtatgattatctgcacttttcttttcatcttcagattatgactgtacccaatgacccttacacttttctctcttgtggtgaagatggaactgttaggtggtttgatacacgcatcaaaactagctgcacaaaagaagattgtaaagatgtaagaattaaatttttatacaaatgatgcagaaaaaattaaggttataattaaaattggttataattaaagttataattaaggttataattaaaagtaagttatgtggatggtaagattatgggtgaatttttaaatttttgttttgctaaaatatttaataagcatatagtttataatcagaaattgaaaaatgtaaaatgttaatattgaagttggagaacttatattttaattgtacatttaaaatatatttatgaaaattcaaataatttgttcagtatatactgtctaatataaaaacctgaagaatttatataaatgtatctcatttactcatggaaacagctttgacttatcaaatagcagttataaaagcttgtggtagttgtctttttttctcctgtcttttaaaccaataattacatgttatcttttttaaaaagaaataataagatagcatgctatcaacatgtttgttcaaatttagcccactttcctaaagataatatctctactatcagtttcttatgctttaatacaattaaattaattaattaattttttttgagacaaggtctcactgtgtcatctcaggccggagtgcagtggtgcaatcctagctcactgcagcctcaatcttctgggctcgagtaatcttcctgccttagcctcccgagtagctgggactacgggtgtgtgccactatgctcaactaattttttttttatttgtagtagataggaggtcttgccatattgcctaggctggtggtgtcaaactcctaggctcaagtgatcctcccgacttggtgtcccaaagtgctgagattacagggatgagccactgtgtttgacttttaatactattttaaacttacaaaaggcctgagaaatcattcagtcttttgaccccagacaagtaattccaagtgatttttcctgacatacattatttagagcacagtagtttttccttggatcattttgaagtagtaaatgaaataagaaagtactattcaaaatatgtttttactgaaagttacaaaaaaaaaaggtactactgttaatcaggttaagtgcttgctaactaaaccagttaccaactggttaacatgctttaggggaaaaagattattttatatatttgaaacagaaataaaacaaaaagtagaaattgaaaaacctttaggctgggtgcggtggctcatgcctctaatcccagcactttgggaggccgaggcaggtggatcacaaggtcaggagttggagaccagcctggtcaacatagtgaaaccctgtctctacaaaaaatacaaaaaattagccgggcgtggtggcaggtgcctgtaatcccagctactcgggaggctgaggaaggagaattgcttgatcctgggaggcggaggttgcagtgagccgagatcacaccactgcactccagctcgggtgacactgcgagactccatctcaaacaaaacaaaacaaaacaaaaaaacctttaaacatacagtttaatcagtttttttgttacgtatttgtatatacacagatatgcaaatagggaagcattgaactaaactcagaaataagcttaaatatcacgttattagggttgtttgatatacctgttccttagagtaagtggtgggtactaaattttgttattgcaaactctcttaaactattttagtgtttcagtgtagtaagatttagttgtgtttttctaaacaaaacccccaggaaaataagaaaacaaatctgataagacgtgaaagtagtctttccttagtaaaacttttcctttatgtataaaagtgaaatgaagcagagagtataaagaaaaactggtaactagagtaatccttaactactaaaaacttagaattatgaaaggcatttggttaatgaattctatgtaatgagagtaatgttctgagattagtaattgaacaaagtataaggttaaattgacttaaaaacattactgaggggccgggcgcggtggctcacgcctgtaatcccagcactttgggaggctgaggcgggcagatcacctgaggttaggagttcgagaccagcctgaccaatgtggagaaaccccatctctactaaaaatacaaaatagccaggcgtggtggcacatgcctgtaatcccagctactctggaggctgaggctggagaatctcttgaacccaggaggtggaggttgcactgcactccaacctggcgacagagcaaaattctatctcaaaaaaaaaaaaaaattactgagaagaatgaggagtgagagtcattagacaaagcagtatggaatcaacagagtaccttcaggatatgtttggggtactagctcttacattttctaattcttctacagagataagtaataacattatagtaagacctgtcttttgcagggtttgtatttatatgtgtactttatttttgagctggttaaggagaaaggttttataagtaaaaagtataaaatatagaagtcagttaattttttgttatattttaatagcagtgattacaattaaaatattatgaataagcctaggcaacatagtgagaccctatttgtacaaaattttttttaaaaaattagcctggtatggtggtgtgcacctgtagtcctagccacttgagaggctgagacaggaggatcacctgacctcaagagtttgaggttacaatgagctgtgatcacaccactgtaagcctgggcaacagagcaagacatatctcaaaaagaaaaaaaaatatgaatactatataaataatcaatagttatagacagtatgagagatttgtcataggtagattataactccatctttgctgtcaagtggaccaataatagcaggcatttctaatggtactaatgacttagtgatacattatataggtaattttgaattttttacatttctaaagatgttcattattcatgagtatgggaatatttaacaggcatttttgagaaataattcaaattgtattataacattgtatgaaatgtagctagtttagaaagagttttaattgtcacataaatatgagtttcttggattattaccatctttttgtagctggcgctgttctagtataattactcagtattttcagtcttatatttgaaagtaatttttattttttcctttttagaatgtatttaattgctcaaatactgatcattttaaaaatctgtattttaattaagtttagtattttcatattttttcttactttaattggtttataaggaaagtctacaatattgtggtagaaatcaatcaattttggagttgtatggccaactataaagaaaagagtatcttccttagaaatattgattgagtatatttattttgatttcacataggctgaatgtattagaaatatttctagtagaaatccgaaaaaaaagttaaaagaaagccgtattgtttttccgctcattgtcattcttgactgaattaggagttctgagaatggttattctaattactaatgagaaaatattttaaatataatttcacctctgctgtataactatatgtaattggtattatgttatgttttgtaggatattttaattaactgtcgacgtgctgccacgtctgttgctatttgcccaccaataccatattaccttgctgttggttgttctgacagctcagtacgaatatatgatcggcgaatgctgggcacaagagctacaggtaagaagataatattagagaaaatataggactgtcagttcaaagagtaaatctctatgacattttcagttttaaaatttcttgtttgttataaaatttcagaaaatagtatttgtttaatatggattattataaaaaataacatttcaccaagtgtttatgaccctttgggatgatacttttgcagtttaaaaagttgtaacatttgatgtattagtttggcaggactgccataacaaatgaccacaaactgggtatcttaaagcaacagaaatttattctcttaaatttctggaggctcagtgtctgaaatcaggatgtcttatgattggtttctactggaagctctgttcgatgccttctcccctagctcatggtggttgctgccaatccttggcatccccttggtatagatgaatcactcttaatctctgccactctctttacatgcaattttccctgtgtgtgtctgcgtttacattttcctcttagggcactagtcatactggatttgggcccacccctaatccagttagggtgaggtgggccctggattaggtgggccctaatccagtatgacctcactgtaactaactacatctgtaaaggtcacattctgaggttctgtgtagacatgaattttggggagactctgctatttttcaatcaagaaaacaatggtaaatgtggtagtaagaaaatttaaaacagtgacttgggtatgtattaatgtgtagcatatatttattcctgcttaccttaaagtgctgttaataatgctgagtactgaatttgaatctaatataaactaatgctctttcccttcactcactataggatcaaagtacttccaaaataaacaattagaagtcaacttccattcacattttttcagtaaaggaaggccaggattacacacacacacacacacacacacacacacaaacaccgaatgcacattcatatattcacatattttatattgttaaaaataaaggtggacttgggcagaaaccaacaatgtcagtaaagatggacatagattattgagatgggaataccagatgagatctttcttttcggaactgtgatagcttttatttatattgctacattaagtcacatatctaataataattgaggagtccagtctatttggatatgtacatttaggggaaacagtaatataatatgaaataataggcttaattattgtttctcaacaggtggacacaattgacattttgagcatgataagacttcattttgcaaggttatacagctttgtgggattcttagaatttagcattcctgggcccccagggcacaaagtgccagttgtacacctatctgtcatattgcattgaagactaccagagttaattaaaattggaatagtattcttaactctgtactatataacaggcaaatttcatggcaatcagaaatttttttaaaaagtaaaagttgtatcatcttaaggatattgcatacgttgcatactaatgtatgtagtatgctaataagtattagctttttgtaaaaatttgttatcttaatttggggggaacttttggaagatgacttcgtgtgattgtatttataaatcattttccttgattaactcatttcaacaaagcatacgtaatctggaattctagacaatcatgaatttttttggtagaggtgttacctttataccatattcttttttgttttgttacaaaatctgactgcagaggaagaacctctactggaaataaacgtgatggcttttatttgtattgctacattaagtcacatgtaataattcagattaagagttttaaaaaatgtttttctttaaaacattattaattttaaataacttcttgtttcttttttagggaattatgcaggtcgagggactactggaatggttgcccgttttattccttcccatcttaataataagtcctgcagagtgacatctctgtgttacagtgaagatggtcaagagattctcgttagttactcttcagattacatatatctttttgacccgaaagatgatacagcacgagaacttaaaactccttctgcggaagagagaagagaagaggtaggtttactcaaaaccatgtcctttggccgggcgcggtggctcacgcctgtaatcccagcgctttgggaggccgaggtgggtggatcacctgcggttgggagtttgcaaccagcctgaccaacatggagaaaccccgtctttactaaaaacacaaaattagctgagcgtggtggcacatgcctgtaatcccagctactcaggagactgaggcagcagaatcgcttgaacccgggaggcggaggttgtggtgagccgaaatcacgccatcgcactccagcctgggcaacaaaagtgaaactccgtctcagaaaaaacaacaacaacaacaacaacaacaaaaaccccatgtcctttattcaattcagaaaacaattcagtgactcttggggcctaaaggccaaaaaaaaaaattaattttcaaggcacttacagttcagaaaacaaaaaacatgagacatacttgaaagaatagaagctaataaattactatcagttattactaattataattagcaattagttactaattactaatagttactaattactaattatagttagtaattagttactaataatttgtaattataattagtaatgacaaaaatagtatttttgtaatttgtgttataattaatagtaaataattactagcgtctattcttaataatgtattagtaataataaatcactaatttattattggtattctaaatactatttctaaaaccttatccctaacagtgaattattagggataaggctttagaaaaaaatattttaaattatttttaaggagaatatacttgatagcaaaatgtttatcttaactttgtagatgtacagcagcagcaagaaagatcaacagtgctaacacttgcagaaaaggcgattaaaataatagaaaatatgatgataaatttccaagagactaaatgtgtatgtccatggatcaatagaagttttacgtattaccatttactcttcatatatggacagcaatccctttctgtcccaattgtgcctctttcacagttacatactagtgatttataacagtaaccttaggtatattttacaaaataaatataagtgggaaaaagataagttaaagtagttgtatatattgaaaagtaggtgaatgaattactttcacaagactactagaagataatgaatttattatttataaaaggggaaaagtagaaataaggtatctttgacagtacacagctgtagaaaaatgtttgctttaacctgtttaagcttctttcctcaacatgtttttcactttggcttttttattttataatgtcctgtgttattcactttgaactttggcttgtaaaagtcttttgaaattaaccattgatttttattttcagtgaccttttggtattggctcaatgcctattaatacgttttaaaggttactaataacagtgattttggaattcctacgagatacaaaactatattcattcctcataatttcaggtgtagagggctgtaaaattagaaatcaggattactttataaatatactttgagatttttatccttgcagtgtatttatttgaattaggaaattgatgaagaagggtatgatggctaataaaatgatttttgagtttattctggttaaaaacatgaaatctgctctgtcattttgttactgctatgcaaatttccccttgaaatacatgggtaagtaaagttatagtcaaactgtgattgttacataatgaaagagttggaagtccatagacattttaagtgggccaactagttttgataccatggaatacttagccaaaagatatttatataatcagagtgaatgaggctgagtcatgaacatttttttttctgggagacttttccttggtcttgtttgttgcattaactaaattaagaaaaacaatgctgaaagtggatttaaattatgcttgttggccgggcgtagtggcttacgcctgtaatcctagcactttgggaggccgaggcgagtggatcacctgaggtcaggagttcaagaccaacctggccaacatggtgaaaccctttctctactgaaaatacaaaaattagctgggcttggtggcaggcgcctgtaatcccagctacttgggaggttgaggcaggagaattgcttgaacccaagagaaggaggttgcatgagccgagatcacgccattgcactccagcctgggtgacaagagcaaaactcagtctcagaaaaaaaaaaaaaaagcttattataacaaaccaaacaattcagaggtatacatagaataaattaataatctgtcttatttgtaattctgacacattttggtgttttatactgaaactttgatgatagtattcagacaaacttaactcaccaaatatttattgggtgcctactatacaccaagtcctctacttaactttggaaaatgaaggatgaccagacaaagacatgatctcttacttaaggaattcacagcttagtggaagtagaggtacaagtaaataaatatgtaaaacttaatatagaattatgtataaggactatgttctgtataagtagaacaaagtagggaataattaatcttgagtaaagcctgaggaaggttttaaagcatgagtaaaagtttgttgtatgattttgtcttatgtttccataatatttttgtattttctcaatttgtggaggcctttctatttccttaccgcctctaataatttctttcatttttttcccccttctttctttggttcattcttttgtcttaattttttttgtactttctgttttcccttatttttctatccttttttctttttatcatctctcttttcttctttttgacagtttaccacctgccctaccccattattgggcttctttgttgaattcattctttcattttcttctggtccccatagcttgtgcctaaaaatatactccagatctgactactgcttaccaccacccttgctgcattaccaccctgatccgagctatcagcatctctggcatgacctatccccctttgtagttgattttgctagctttctaaccagtcttcctgctttcacttcctacagccctatagctatacagcattcaaagtgatccttagaaacataagttaaatcatgccgctcttctcatcaacattctaagtggctccctgtcggacctaaagcaaaactgaagtccttatggtggcttcaagatcttatattatctggtcctaattattacttctactgttttcttctttactgtgctctaaccacatctacttgcttagtaactcaggccaagcatgactctattttaggattttgcatttactctgcctgaaatgctcttccctggatacctggattttttcttccctgtgtatttcaggtctttgcttatgtaaccttcttggtgaagccctacttcaccatcctatttaaaatcacggcctttaactgatactacctatccccttttctactttatttctctccataacagtaactttctatgtatattttgctttttcatttcatgtgttgtttgctccatcgggctgtaaattctgtgacattggggattttttgtgtgttttgtccattgttgttttccaatacctgtaatagtacctgacatataaaaggtgctcaaaaaatatttggtgaatgaaacgccattttcagtattcttgcctaggttatttcacatactcagaaagtcaaatttgagattgtttttaatttgaagattttattctataaataattgctgaggttgtaaaaccagttctttggctatgtaatataaaaattcctctctgttgaaaccatgaagcaagattctattatattgttttaagaatagttcgtatgaaggatgaagccctctccttttgggagtgattagttgtttgagaatttgcacagctgccacattaagctttgttctggttattccctgtcacacacttacgtcttcctgtgtagattttactattctcagttgcctttagccatacttacacataatatggaatttatggggatttttttttctgtctcctttgctcaggatgcaaagatttttttctattcatgttactaggtatggtttccagaagaaatcagaaaattcactgttaagtgtcaccaagtttttatcaaaacctgtttaattttcaggaaaaaaaaatcaatgaatgctgtttttaaaaaataaataaaaataaaaagagtgacccacaggatgggagaaaatgttttgcagatcatgtgtctggttacagtttagtatccagaatgtataaggaacacttacagtgcaacaataaaaagacaaatatccaaacttaaaaataggtaaaggatttgaatatataatacttttttttccccagagaagacatataatagaaatggcaataagtacataaggagatactcaacgttattagtcctcagggaaatgcagatcacaaccacagtgagatatcacttcatacccactaggatgactaaaataaaaaagacagacaataacaagttttgacaaacatgtagagaaattggaaccctcaaaaaattagagttattatatgagccatacttctcctcccagatatacaggcttctcttggagatattgcaggtttggttctagaccattgcaataaagtaaatattgcattaaagcaagtcacacagatcttttggtttcccagtgcatgtaaaagttatgtttatactgtaccatagtctgttaagtgtgcaatagcattatatcttaaaaaccaatgtatataccttaatttaaaaatacttcattgctaaaaagtgctaacaatcatctgaacctcagtaagttgtattctttttgctggtggaggggcttaccttaatgttgatcactgctgactgatcagagtggtggttgctgaaggttggggctgtgacagtttcttgaaataagacatcagtgaagtttctgcatcgatagactcttcctttcataaaagatgtatttgtagcttgtaacggtgtttgatagcttcttacacacaatagaacttttctccaaattggagtcagtcctttcaaaccctgctgctgctttatcaactaagtttatgtagtactctataatagatccttttgttgtcatttcagcagtgttcacagcatcttcactaggagttgcttcttacggatgagcaaagaaagtggtttgcgcctcaagaaaccactttctttgctcatccataaggagcaactccttatctgttagttttatcatgagattgcaacaattctcacaccttcagtctgtacttctaattctagttcttttgttgttttcacctcatctgcagtgacttcctctactgaagtcttctacccctcaaagtgatccactagggttggaattaacttcttccaaactcctgttaatattgttattttgacctcccacgaatcacaaaagttcttaataaggcatctagaatggtcaatcctttctaggttttcagttgacttttcacagatccatgagaggaatcactatctgtggcagctatagccttacaaaatgtgtttcttaaataagacctgaaggttgaaattactctttgatctatgggatacaatgaaaatgttaatctccatgtacatctccatcagagcccttggatgaccaggtgcattgtcaatgcccagtagtattttgaaaggaatctttttttctgagcagtaggtctcaatagtgggcttcaaatagtcagtaaaacatgctgtaaagagatgtgccctcatccaggctttgttattccatttatagagcagattcaattaaacataattcttaagggccttaggattttcagaatggtaaatgagcattggcttctgcttaatgtcaccactgcataagcccctaacaagagaaccagcatgtccttcgaagctttgaaggcaggcatcagcttctcctctctagctgtgaaagtcctaaatggcatctgcttctgatagaaggctgtttcatttgcattggaaatctgtcgtttagggtagccactttgatcaattatcttagctagatcttctggataacttgctgcagcttccacatcaggacttgctgctttaccttgtacttttatgttacagaaagacagcttctttccttaaactgcatgaaccaacctctgttagcttcagacttttattctacagctcccttacctctaacagttttcatagctttaaagagatttagcgccttgctctgggttaggctttagcttaagggaatgtgatgactggtttgatcttccttctagaccactcagactgtttccatatcagtaataaggctgtttcgttttcttatcattcatatgtccactggagtagcacttttctaaaagttccttccagaacttttcctttgcatttacaaatttgctaactgtttggtgcaagaggcctagcttttggcctgtcttggctttcaacatgctttcctcacttagcttaatcgtttctagcttttgatttaaagtgaaaggcatatgactcttcccttcacttgaacacttagagaccattgtagggttattaactggcctaatttcaatattattgttgtgtctcaagaaattggaaggctcgagagggagagagatggggaaacagctggtcagtgaagcagtcagaatacacataacatttgtcaattaaattcagagtcttatatggatgcggtttgtggctccccaaagcaattacaatagtaagatcaaaggtctctgatcacagatcaccataataggtaggataataatgaataagtttgaaatatgagaattactgaaatgtgacacaaacataaaatgagcacatgctattggaaaaaatagcaccaatagtcttattcaatgcagggttgccactaaatttgtaaaaaaccacagtatctgtgaaattcagtgaagcaaagtgcaataaaatgaggtactatgtttcaattcttttgggtagttctcctgtatacccaagagaattgaaacatgttcctacagaaacttgtacatatgcttaattcagcattattcataatagccaacaagtggaataagtttgttcgtcaaccaattgacgaatggatgaacagaatagggtatcttgctaaaatggggtattatgaaaaatgaagtactgatacctgctacaatatgaataaaccttgaaaacataatactaagtgaaagaaaccaaacacgaaaggccatgtattgtatgattatttatatgaaatgtttagaaaaggcatatccacagagacaggaagtagattagtggttgccaggagctgagcagagggatgagtggggagtggctgatgatggtttgtttctgggatgatgaaaacggtctggaattatataatgatgacggttgtacctctttatgaatatacaccactgaattgtataatttaaaattatgaatattatggtatgtgaattatatttcaatacaaaaatgtttaaaatggatcagatgtggtggctcatgcctgtaatcccaacactttgggaggcagaagtgggaggattgcttgaggccaggagttcaagaccaacctgggcaacatagctagactccatctctaaaaaaatttttaaaacagctggttgtggtggcacatgcaccaactactcaggaagctgtggctggagatcttattagctctggagttggagcttacagtgagctaggatgggaccactgcaatccagtctggagaagagtgtgagaccctgcctggaaaaaaaaaagttaaaaatgtaaacattaaagggagcggtcaagagtgataggtgccataaacatgtcaaataagctctgaaagatgctgtttgagttggcaattgattattgatcatattattgaacactttataattgatcagtgaacttggcaattgatcattcactggtgactggtgagaatgaagttagtggaaagataggaaatcaatggaaagattgactacagtggattgaaggaggagtggtagattgaatatagaattttctcaagaagcttaagtaaagtgatagcaagagaaaggactgtagctgtaaaactgagattttatgaagttgaaatattgttttttttcttaaaaatgataagaacctttagcatgctgtggcaaagagccaagagagagaaaatggatgtaggtatagagaagagagaataattggtcaagcaagatactcaaggagttgaaggaatgaaataaaaagcacagatggagaaattaggcttaaatagaataaatgatacacccttcaagaaaggctggaaggagttagaaagttgtagatgtagatttaatttatagaattcagctgaagaaaatgatgttatttttattttctctgaagtaggaggaaaaattgttaagagggcaagaatgagggcagcaggatggaatagatagcctgaggcaagtcataaagggtcgcaatagattctgtttgggaaccgaagagtaaattgtcaataatgagtaaattgtcaataataaataaaaataatgatggttcccattgttaattaggtatgtgggtaatttaactagactatatttatcatcacaatagaaaactaaggctcaagatggttaaaaatatcttccttttgtcagctggaaggtgatacaggtgggattagaaatcacatatacatgatttcaaagttgcattcaggctctttaggttgaagatattagatataggctgtcaacatcagtggatatttatcctcagaatgaatgctttaaaagactgacgcttataccagtgtctttcatattttcatgtagatctaatttgcatactcaagaagtagggagatggaaataaatagacataaagtatgctttaagagttgagagtagatgagttttagacttacatagaatttacccgttcttattttttagttgcgacaaccaccagttaagcgtttgagacttcgtggtgattggtcagatactggacccagagcaaggccggagagtgaacgagaacgagatggtaactatactttggtcagcttttctttgtatatggtattttaaaattaatattttaacttccagtttcttcactattataaattattctgtaatgaacattcttatacatataggtatacttatgcaaatatatcttaggataaattcttagaagtggaatggctgagtcactggataagtaccttttaattttggtagttgttatcaaattagtctccaaaaaagatgtgctaatttacattcccactgaaagtataagaatgcccattaccccatagtacgttgggtattgtcagactttgcagtttttgcctttctattagatattaagagaaatgaaaactcagcccaagggttttatattagcacataaaatgttttctatcaagtgcctttgataagcataagaatcaaccctgggagctttaagatagcacacttgaaaatagaattaatctatgaattataattctatattattatgttttattaaattggtctgtaaccaaaatcttactataatgacttctgaaacatctcttgtgatcaaaagcatattccccaatatatgagctacattatataaaggcaataaagtgtaaaagaaactctgatttcacagaaaatgtaagaagaaccgattttcattttaaattataagactatagaatagagttgtcacattttgaatttgacattacacttttaatttgaaaatacccttggaaaaacttgtttacttgcaggaggaaaaggagtgagggaagagacaaaatactttctggttccagttaatttcaaatatctgaaatttgcttacagtaaatgatgttgaaaataaattgactttaaggaaacttcatgcaaaagcataaggctattttgtgtctgtacttgattataatgctttagggagagggaaaacctttcttttaatctattaaacttagaattcatgagcctttcttggctgggtactcttagaactaaaaatttaggttgaggtaggaagtgggaggtttagtggtacctaagaataggcaaagatgaaggagaggtgagccctgttctcaagaaaccttaccatacacatggaaagtcactgatataaacaattactataaaatgtgatgagagctctaatagatttatatacattcatacaatttatttaggaaatttgatttttaaaaatatgctttcattttaaagcccttcaaatctaggtttttgtattaatgaaagattctgacttattactaaactcactgataagacctatattgtaataggagagcagagtcccaatgtgtcattgatgcagagaatgtctgatatgttatcaagatggtttgaagaagcaagtgaggttgcacaaagcaatagaggacgaggaagatctcgacccagaggtaatttttaatgttaattaaagtcatcagaaagctggcaaaaactacttattgaagccagtttttatttctatcatgtaaattataccatgttttacatctgtaataatcacaaggttcttattgtgtggtgtgaagtagtagagaataaaagatattggatataatttgtcccttctggtgccattggacctagtgcgtatcttttgcttttctcaaagtaaagtagaagaatctgaggtttcctattttaagcctttttttaatgcactctgagaatggaaatatataaaattctgtgtataaacaagttttatgtaataggaaagattgattgctttaacaagaatatgttgtagataagtttttatccctcttgactggcctattttgtcaaatgggccaaatcaccagtagttattatcactgaaattatatatttgtgtgtgtaaatataaatgtgttttctgagcatatctgtttagagttgttggttttagaaaatatttaaaatttgaatttgccttaacatgtgttttgaaggtggaacaagtcaatcagatatttcaactcttcctacggtcccatcaagtcctgatttggaagtgagtgaaactgcaatggaagtagatactccagctgaacaatttcttcagccttctacatcctctacaatgtcagctcaggctcattcgacatcatctcccacagaaagccctcattctactcctttgctatcttctccagacagtgaacaaaggcagtctgttgaggcatctggacaccacacacatcatcagtctggtgaggataagtatgctgtggttcatctaatgatttttgatagtgaaaatttctttactggctattttgaaagatactaaatcacatcaacttcttgttggaataaatgatcaaaatgacatgtaatatatggttatgtaacttaaacacaaaaattaattatgtcttacttgcatgaattttaacaaatagcaggaatcttcaatttatataaaacaattgttttaaaagtacaagtaccaaaagatagtgttttgacatagtttaatgtgcctgacttaaatattattttatagattattagagaccaaaatatctttctagatttatttggttttatgtctatattaaagtgattatgaaaatatcagtattagtttcactttgcttatattcttgattatttccctcaaataatgcagtacttttaatatactctctatggtggatttgatatggtcttttgtcaacaacatataatttaccaaaaaatttgtttctctagtatttacatgaaaaagaattattttaccaaatgcttatcttcttgatacttgatgctagtgaaaataacctctacgttctgttaaaatgctatttttttctcagtattataagtctttatggtcaacttttttcccctaactatggaatgtgctagtatttataatagtaattttcagcagatgtatctacagtttactcggtactttaaactatatacatgtaattataaaaaccaataagatatttattcatagttttctttggttcttctaaggaagaattttactcaatatagagccagaattattagcaactagaaatatagctggcaggcctaagctgaaacctataaaaaaatttctaacagcttagctgccaagctgtcactttattcttacatctctggaaactgatgccagattaccaaatatgggatgttttaatttaagcactcttttatcagtatataccacttttagtaattcattttcagtttctatgggaataaaagccagagtcagttacataactgttaacactgtatacattttatccataataataagctaaagctgagctacagaatcaaggttttcacactcagttgacatagcattttaatttatggaaaaataaaatattttggaagatttgggaattaaaagcagaagtagttaaaagtttgtttttcaaagcaggtaaaattgggaaaagcaagaatttttaaagtgatattcttgaacatattgatcaattataagtttttaggaaaacttagcaagaagactctagcttacattcagcttccactgaatctcaactaattctagttgtttcttaaatatatttatgagtaaagtatttggaactttattttttaaagctatctaatgcattttaattactgcatttcaaattgctaaattcctttcaatatttaatgtaagtattaaatgtgacaatcatttgaattattgaagaagaaaaaatatctttggtggtcatgtgatgattattgaaacattatgcagtacttttactcataaattatttataggaagtaaggaaatatttttaactgggagattattgagagaattttggttgactaagctatagataattagaatatttccatgttatcaagacattatcactattgagaaaaatgatttggtgttagatgtaacatctgaaggttatgactgtagttgttctgataacagctttttcattattctggagttcaacgtttcaggagtaaggacttaatttgtttctgtttttgttttttgtccaatctcttttgcatttgccatagcctaagtccaaatgtgtttgtgaatattgggaattgtccattgggtgaatgtagtagatggaaatgtcagcttaggaccatgatttctattatttccctgcatagagatagagaaaatgataaagtatacttctgtctatgcttgccttgctgtggatacctttttatgtaaatgtttatccctttacatgtcctccctcatttttactgatatcaaagaaacggacaatgggaatatgaaaatttgctacgctccatctctggttgaacctaattgtctgccttctcttagtctacagtggaatcactgaatgataatgaagaaagttatgaccacaaatttcaatgggtgctcaacactgtgcatcagagcagcctcacactgttgctctccagctgtacaaaatgactattttacactttcatgtctctcaaactttaatacttcccttcatccccgccccacttccagattctaacctttcattcacaatgaaaagtactcgttttcctactgtcaataatttcccagctttccaacatctgtactcacattgtgatagaagcagaaagctcctatcaaaagctagtcaatgtagttgctatccctttccagcttctcaaagatttcgccccttctcttgcattatcattgcctttttttgccaaattgtttcttttggccttaacatgctcttattatctcctttctttaaaaattttctcttaattatctcacattccccttcagctattgccttatttctctgctgctttcgtaatgagaatcctcagaagagttgttgatagatgctctctccattttcttgccatccttcatttatttattaaccaacccccatctgcttttcaacccccttttcctctgaaacttttaatcaaagtcactagtgacattcaccagtttaaaggatatttctctgttagtaccttactagatttttcgacccggttgcatttaacataggctgtcactccttcttgaaacactttcctttcttggtatctatgatatcatatttgcctatttactcttattaattctggtgggttttcagtaactgttgttcgtgtttcttgttctatctccttctgaatattataatcaaaccccttagtttgggctctcttctcttctctttacatacactctttctctgggtgattgtgtcagttcctcatagcttttaatatctcctgtaaattcatgactcacaaatatatatatcagcaatctgatcttctaccctgaattccagacccttatgcctgatgtctgactgctattttgacagtatgtttttgttattgttgtacatcttttttttttttttttttttttttttttaaagacagtctcactctgtcacccaggctggagtgcagtgcacaatctcaggtcactgcagcctccccctcctgggttcaagcaattctcctgcctcagcctcccaagtagctgggattacaggttcctgccaccacacccagcaaatttttgtatttttagtagagatggggttccccatgttggtcaggctggtcttgaactcctaacctcaagcagtccatccgcctcggcctcccaaaatgctgggattacaggcatgagccactgcacccggcctattgttgtacgtcataaatctacatgttcaaactaaaacttaatgcagcctcctacccttcctgttccgtaattggctccttcttggtccatttgcttatttgaataacctgtgagtttttcttgattccttccttttcctcaagtcccatgccagctcatcagcaagttcttttgttcctgtatctaaactataacctgggtcttttcatctcaccatcatttcttgtctcctaattaatctgcctgtacctactgttgttccattataatgtattctccatgcaggagccagaatgagtattttaacatgttaaatcagattatataactttgctgtttaaatcccttcagaagttcctaattgcatttggaaatacaactacaaaagaaaaaaaaatcaaactcctcactgtggacgtataagaatttatatggcctgcccttccctgtctctctagcctcatctcattcaattttctcagtacttgatgattgttacactctagatgtactactgatttctttcggttatcagagaatttccgtgccaaattctgccctgccctgccctgccctcccccgccccaccccgcctccaccctgcccccaccccctcccctcccccctccctccctcccttcctcccacttgcttgctttctctctctctctttctctctctcttttctttcttttcttccttcttttcttttctccttccttcctttctttctttttcttctttttagacagagtcttgcactgttgcccaggctggagtgcagtggcgtgatctcggctcactgcaagctctgcctcctgggttcacgccattctcctgcctcagcctcccaagtagctgggactacaggcgcctgccaccatgcccggctaattttttatacttttagtagagacagggtttcaccgtgttggccacgatggtctcaatctcctgaccttgtgatccgccctcctcggcctcccaaagtgctgggattacaggcgtgagccactgtgccctgccattttcttttctttctcttctcttctcttcttctttccttccttcctcccttccttccttccttccttccttccttccttccttccttcctttctttctttctttctctctctctcttttgtttctttctgtctctctctctttctttctttctgtctctctctcttccttcctccctccctcccttccttcacttcttccctcccttccttccttccttctttcctccatcccttctttccttctcctctttctcctttttctcctttcccatctttctctctttcctgtcttttcttttctttccctctttccttcttacactttgttcttagtgttattctctgtatgcttgggaagcccttgtcctggcttatcacttggccaacttccttttccttgagtctcagctcaaatgccatataagacaagtctttcataactaccctaggtaaagtcctctttcctttttcttcttgctgaaattttattctcttctatataaccctgtttattttgtgaaaagcaattataaaaatttataattttcttttactatgataagctctcttgaagacaggatattgtctatcttgttgtctctgagtaagcatcttttttccccaacaatattcaccctctaaagatacgattaaaagtgtgatgagacattttgttatctttaagctgatatagactagatagggtatatttagctttattttagtctttagattatacttttagccccagtcatttactctggctgtttccattaagtttccaaaatttggtaacacctagaagagagatgctgtgattagctgtctaaccatttatcattttggatccattgtttgcctttgactgtctagaccacataggactgagtagataattgttcttaggttgttctgaagacattttaaggtaacttacagaaatactttaaaaaattgtctcattatatatatatatatttgtttgtgctttttcactcatgtatatatgggtgaatatgggtatgaaaataattaattgaagcagtgagtgagttgaatacgcaaaatgaatgccctgaagaatggtaaatctagaggggtcacagtgttggctttggagttttgtagctaaattaggaaggtaagtagactgaaatggaatttaaaatcagttgatggatttttttttttgctttaccctttgtattcttgaattttattttaattcatatgtcagaccatttgaaaccacgttctatatacctcgcccagaatttgaagatattttgatttttatatatcttcttttcttgaacatttaacaaaagactgctttttaaaatgtgattataaaattatatgtttaaaaatgagaaagatacgaccatgagctaaaactgtataggttaaaatgaaatcttcataattttatttataaaaaatatttcaaaataactatgaatattttcttctcagtaaggcctatcagacatctctttcagttatttcttaagttaagcctagaaatgttttcatttagttcatgatttgtaaattattctcatgttaagaatcttttcataatgaaagagtattaaatgaggcatttttccaagtgtgctatttaatttttttctttggtttcattttaacctatttaaagaatatgatttagagaagctggtaactttgaagtggatggggatatcagtatatataaaattcacctttagggctcatattgagaagtgaatcacttaaagcttccctgccctgtgtttttaattaaatagactactcagaccatcagaattttttttttttttttttttttttgagatggagtcttgctctgtcaccaggctggagtgcagtggcgcgacctcggctcactgcaacctctgcccccgggttcaagtgattcccctgcctcagcctcctgagtaactgggactacaggcacatgccaccatgtctggctaattttttttgtattttagtggagatgggatttcaccatgttggccaggatggtcttgatctcctgagctcgtgatccacccgccttggcctcccaaaatgctgggattacaggcgtgagccactgcgcccgacccagaattttttaaagatagcatatgatgtggtctgtgtgtggattcttgcttatttagtcataaacaggaattacaaatttattttggcctatgtagaattattatagctaaattgagctttgtagaaaaattgctggagaagaactctgttgtgcaccatatcaaagcaaacctttcaaagccccaaatccaaattatagcttccttaaatgggataaaggtctagtctagtctagtcagatagatataggccatttataggttagaaacaagtggagagaccaggtgtggtagctcatgcctgtaatcccagcactttggaaggccgaggtgggtggattacctgaggtcaggagtttgagaccagcctggacaacatggtgaaactccatttctaccaaaataaatttgttgtgcgtggtggcatgtgcctgtaatcccagctacttgggaggctgaggcaggagaactgcatgaacccagtaggcagaggttgcagtgagccgagatcactccattgcactccagcctgggcgacagagtgagcctctgtctcagaaaaaagaaagaaagaaagaaagaaacaagtggaaatattaggtcaatggccatttttggggaaaccaaagaagagaacagagaaacatggaggtcagtgaagaagtgaccagtcccaggagaaaaaatgcacaaggatcattaccaggacaagaaataagttgggactagaagacagatttatagcaggcagataaagtgccaccaaattagatataaaaatgatccagagtccaggacaaaaatactgtatgtattgtagaggcaggatgtgaggttagaaccaggtggacctttgttgcgtcaactgtagctgtttttgttgttcttctgtctcactggaattaagtcattaggagaataacctgtaatctttcagaagaaaacaagaatagggtttgtagtttgaggagatgacaaagtacaattttcctgtggcagtttataataccttgttgaatttttatcatcgttgtttttaaaattcaacccaaggtatttattgtattcaattttcagtttgggtcatgttgacaaaagctaattctccaagcatttatctacatttataaattatgtatgtttgtgatatctttttaaaggatgtaatatgtgtgtatgttgactgctttaaaatttcaagctgctagcagaactgttatttagtctgttatgtctggttgaattttttaattcaatacttgcttttcctagttaacagctatgtggtgacttctcttctgagcctgattttgtttttaatccaaggagaaaaaagccaccatacaagcagctttcaaagcagataaattcttatttaaaaagcaccggaaatattgaataaatggttcataagattatcacaactaaatcttgatttttttcaagttttagagcatcactacatgtactgagatcttgctgtttgccacttcaccaagtgggttctgggatggagatttatgtcttcataaaacatttggtaactcaatagagagggttgacactccaatgaaattgatggtatttttctgcttttttagcaaaatttgacatatatggcctctctcatagatttcttttgaagtgtgaagtgacaaactttatggctgtataataatgctttattttatattgctaaaagcattactattatgctgactataaataaggtgtctgtacctacctgaaaagaaagcagtatgccactgagcatcaccatttgtttgtcaatgaatactaccctattggtactggatcattttctaggaagaactaacagtgagtgagtatgatgttatgagttattaaatcttaactaccaattgggtaattgaataaaatgctttataaatagaaaccatcgtaacaagaaattagtacctggcgttattgatttctgaaacagtaaaccaaattttttactcttagtatctggagaggctgaaagtttatttggtagtttgtataatttcatgctagtgtcagaaattctctatgctcctaccaccaaatctcactattgacatctctgtgcatattttctgcctccctttgattataattaatgaggtttttatgcacctattcaaaaccaattcctcctctgatacactggaacttatctcctttagtttactcagggacatcattcctgtggttttccgcttttttttaagcatcatctttctctctccttcagttaaacattctccatcagaatacagacgtgtgtattagctcccaaactaaaaccacaaacttctcttgattattattattattattttttggtgggtcttcctctgttgcccgggctggagtgcaatggtgcagtcgtggcttactgcagccttgacctccctggctcaagtgatcctcctacctcagcctcccgaggggccacaagtgtgcatcaccatgcctggctaattttgattttttgtggaaacaggatctcactgtgttgcccaggctggtttcaaactcctgagctcaaagtgatactctcgccttggtctcccaaagtgctgggattacaggtgtgagtcacggtgcccttcctgccttcccttgattctttataaccctgacaatgattatccaatttatctgttctccactaatagcaagagttgtacaaagaatatatatactttgtgtctctacttcatcacctcccctttctcttaaacctgctgctatcagattttggtccttattatttaactaaaatagctcttgtcgaggtcatcaatgacttccatcatacaaaatccagtgattagcccttagtatctcttttagtatactagcagcatttcacacaactgcttactccatcctttttgatacaatttcacgacttagcctacagagctctgatcattcagttctccagctctctctctggcttttccttcttactctttctagaggttctttttcctcttaaacatttgactgcctcaagattcagttcttagacctcttctgtgtcatcccttactctttaggggacttaaaatgacatccaaatttatatctctgaattgtagacttttgtattcagtccctacctaatttctccacttggatgtctattcattctttcccccaacactacttgtttctccattgttccctgccgtaataaattggttacttgtttttcccgttacctaggccaaaaactttgggatcactctgcatccaaactatcagcaaattctactgcttttacctttaaaatgtattgcacattcctatatgctttccccttgagtatttgcacttgctcttttctccacctggaacactcttcctccaggtatccatgtggtttactcgcttatttcctcgaggtgtttgttcaagtggtgccttatgagagaagctttcctgagttgccatatataaaataacccttgccctgtcatcattattcactatcccctttaccttaccctgccaatttaattcatagcagttatccccacgtgacacaaacacatatgttcaacatcatgtgtgcctgtgtattcgcaaatgtctttttctctcagaacattaactccacaagaataaggactgttttgttcaatattttatttatccctagagcctaaaacaatgcctcatacatagaagacattcagtaaatatctctttgcagaatttaatgttatttttctacttttcatctgtgatcacttcagataaaggttaagaaaatattgattatgtaaatctttttgaacttaaaaaattttttaaaatgacaattctaacatgaaatatttagctgaagaatatataactcacttttttagagctcttctcaataaattctgagttgtttctaaatgcataagtttttatccttttaattgaattttgttatttgattgaaattaacaaagcagcttaaatttttgtgtataaatcagatgagttaactgattgttttcaatttctgtttctttcctagtatcattttgttctatgttcattttgaaatcttttgcttatggaggactttttatttccatttggtttaattacttaaatattcctagagaaatatatgtatctaattcatcgtagttaaatagaagcatttggttgtatatgtattgtctcataatttaatgaccagtaattttttatcagtaatttgtttatagtattcctctatgagacatgtgttttgtttatatccttcttcttttttaatgtataatcaaattcttattattttctattttattactgtcttttcacctttcttttcctatttgtgtcagaatttttaaggggccctgagatagctttgcttcgtaagcgcctgcaacaactgaggcttaagaaggctgagcagcagaggcagcaagagctagctgcacatacccagcaacagccttccacttctgatcagtcttctcatgagggctcttcacaggaccctcatgcttcaggttattaatgtcaagtgtccttaagcagctgatagaattgttttttaatactgctactgtgtaataaggtgcttcccttttcccattcaaaaagagagctaatgcgcttgcagcttacccctcctttccttgcatatgggtggtattcaacatcacgtgttagggggacagattggcagcagcatctgccagagaggtgaatataaaataatcaattttaaaagttgtaatatatttggagaggggcaaatatttattacttttaaagctgatgacctctttttgaataattagtgaatttagagcctgcattgatctttctattgaaagtttgcatatgctgaaatgaatctatgctttatggctcctagctcttcttcttcttcctctttgaatgttagccaatattcctaaaacctagtaatgctagattttagaattatagtattatttggccatactagcatgctgactaaattatttccttctgtcattatttgaaaattttcaatatttgctttcttattcctctatacgtaatcaactttctgatgtgtagggcagcaaaagtactccacagtctcatgttcttattatgctataaaactgtgataacatagtaaaaattgtcactctttttttctcaatgagtgttttaatgccctgtcatcttatgaccagaaagttcatgatgctcaataaacatttgttaaaagaattaatgaaagatatattaatagcacaaaataatttgtcaacttagttatttcaagatgggtaatagatactgtaaatcctatagtattatataaatactatagtaggtataataagttatttaggaacaagaatgtctaggttctcatactaatcagtttataatgctttgtttgatatgctttcttctgctaccctaaagagtgatgagtttgggctttgagagttctaatttgattatttggaactaatttatatattggtagaattggacaacctgcactttataaatatctgttctagtaagtgctgtggtaacaaaagcacattttatatgtggtaaaattaaataaatttaagtcattgtaatatagatatgatgtttgggataaatcataaactttatttttaattcaatgttatattaatagagggagtatcaggcagaggcctctgatttttttttttcctatggggaaatattttcctatactttaacaattaacaagaaaatttgaccagattacaataatgacatttaataataaaacatttttgtttttttttttgctgtatataaacgtctagcaaacatgttttgaaggttaaaaaatcatgaaacctaaaagtcaatagaaagaaaaataaaatgtccctacgtatataattatttttaaaatactaaaatttagcagattacaaacttagtattaaaatgatcttgagtataaaacaaaactgtctaacaggaaagaagtatacattgtagatgttggaaaaatattttgagattcactaatcttttgtaactagttcacggatttgaattgaagcaagctctttttagaatcagaaagctttagagtgaatgtgtggtttctgtgaagtaagatgctgtctttccaactcttaagtgttttctaattaaatatctagtttggcaacagtagaaattaaatttatgaaattcagcaggagggtaggttttaattgagtaacaattataaaactttatcttatacataataattaaatgcagttttgtatatggacattaattgattcattcttttatgatagatgttactactatctacccatacagaaagcaccaaaattagcctcctagattttaatttattaataatagaagaatgtgcgtttctcatatgtaagaagcatatttttccttcatactttggtatctttagagtatcaattagtggtgatagtgccagtaaaacatatttctgttgtcttctcacctatttaagtgttttagctataagatgttcaaaggagacattactatgatttggaaaccaagaaattttaaaaagtatagaaagaatttctgcattacattgtttggcaaccattttattctcttttcaaaatatatagaactcatgggaatattctgtgaaatcagtaatacctaattcctgtaggaaagttagatcaaaccttgaaaccactttgtagaaataatcacctacatttttagtgggctcaaatgggaaggggcctgatgctggtttaggataatcccagatggaatattatctatttagttgctgatatttcttggcaattgaagactaaaacaccattctaaggcaccaaatgatatcaccttaagtttcaaactgtttaaaatgagctgtataaaataggtattagaagatgttaaacagtggttttttatttatttttggttgttcactctttgtcatcagtcttatgtggaaattccaatagaaagtatataaaagtagcactgttgggacttaaacatgaaacaaggagcgactacccacctgcttgctcctcctgctacccctaaagctcctctgctccctgaagcccagtttgaaaatcagtgctttaaaagaatttttgacacctgtaaatgataattctttagaactaatttccaaaaatatggttttaaaaaattagaatatatcatttaaaaatattttcacttgttagttttttaaaagtatatcttttctaggaaatacaccacaactcatttaggaaatacaccataacttgttttctagacttttaggaaatatgcaggaactcataaaatccttagcaattttttttaaccaaaaagaaatgaatttgcctttatcacatcagtgcctgggaattagattggctgaactcttgtccctggctttatgactagatgaccttgggcaggtcatttgactgctttatgcctcagtttcccaattattgatttatttagatagtgtagcttgctgtaatttacagagaccatgtaaggatgggttaaggcaatacagtatatatgaagttacctacctgaggagagcagtacacatgataatgtactctctcttttttttttttcttttttgagatggagtctcgctttgtcgcccaagctggagtgcagtggtgctatcttggctcactgcaacctccacctcccgggttcaagtgattctcttgcctcagcctcccaagtagctgggattacaggcatgtgccactatgcccggctaattttttgtatttttggtagagatgggatttcaccgtgtcagccaggatggtcttgatctcctgaccttgtgatccacccactgcagccacccaaagttctgggattacaggtgtgaaccaccatgcccagccaataatgtactatcttaattgtagtatgttgtttgctacttaaaaatgtcctcatataaaggcccccataaggttgatagcattcagggttttgaatgagctatatgtacatgtatcagatgaatgtcctaaacaggtatggcagaggcattcagcatatggctgattttaagcccaactctttttttccatttcaggtcccctgaagtcatgggttgctggctcctgctcagagtgacagcaccctgtggagtctgctggtactgacctaaccaccacagagccccactggagcatggagccagcctagagagggtcaggtaggaactgttttttcactttatggcacggttttaccaattggaaaaaagtaatttttataccccaaaagggtgtaaaacattggtgattatttttgaaaaagggcttttcaaaactgagccatattggaaaaaatcagcacttacccgatcctgtgcaagcaggctctaaacaacaccagatttcccacagtgtccataatgacagtcacatggcagcacttctcagatggatgcattggatctatgtgtttgatgtttataagtagttaataaattagatatattagtctggttctgccagcagtccttaactaccttgaatgacagagtccaaagcaaaacagtgatgagtcttttagaagtttaaacataatacgctccagatgtttcagaacagctttgtaccattatttttcattcaataccatatgtctgaaaaataggcaagtaatgataaacattaaatgacccattcctatgtgctgtctgaatattttacatggattatctcattacatcttcagaagaacattatgtagtagatattgtgattatcctcattttacagatggagaaactgagacttagacaagttaaataacttgcccagggttacaatattactgagtagaaaaaccacatttgaacccaggaagtgtggctgaagaatttttgtgatttacctgttagactataattgtctattttttctacagtggagataattctggtgtcaaggggctaaagaattttctcaagaccaaacaacacattttttggaaatacacagtaattgaccatgagacatgctgagcttagtactgagtgagcttttgcttaaagtgtatctttaccttaaaaaaaagttacaattctaaacacttcaaataagctgaccaaccatattacatgttacaataaactaccattggaccatatattcaggtttttagtttgtgattatattctctagaaggtatttcccagagaggtagagtagaatatgccagtaactgaggcagtcagcttaaactagtaattacttttttaaatattagctattctaatggttattatgttaatatttgaaaatatttatgtaagataggagttctaggtattgtatttatgaatagtggttaaaaaaacatgtcacttaaaatgttcatatgataggaaaataatccttcccaaaggagttgtgtgttcccaagattacaaatagaatgaaagcagtgaccaggaaggatttcttcataaaattaatcttcaagatgggaggaacagcaaatgcctcagaaatacacaatgtctatggcagactaaaaccaaaaaggaaacccttttagtttaatactttctgtcttaacatagctttaatattttaaatacttcaagagtttgaaaatagttttgtagagatgacagcattctatatctttcattaatagttttttccccgtgacttattctttcttaaattttattaaaaataagatgcattttatctgaacaagatttgtacatttcatggtattttttagaaaaaataaatgtttgaagataagatttcttggagagtttatagttttcttacggctcttaaattgttaaatgagggcataatgaaatgtataacaaatccaaatggatgaaaaatatttttcacagatttttaggagagtttcccaatatttatttcactgtgagtcacatttttcttgtttttttaaagagtttaatttgttttctaaagaccaatttatctgttctttaaaaacaacatagatggtagtgttgaatccaactgtgaaatggataaatgagaaggcatcttaagaaagtaaagcacgaatagattagggaactgattgaaatgctattgttcccactttcttttttgtgtactaaagatttaactgttctgatgaaaaagtgataagtaaggataagtaaaagctgttattcaaataatgatcatgttttgtcaaaatctagtaagagaaaaatacatgaacaaactggtgatactagaagatggaagatttaaagttgattgaaatggtaccactagcaggattcagacttttaaatgtacaaatgcaagcaatcaaatcctataaaatcaatgtgaatccaggatatattggaaaactcagctatccagctaaggacaatcttaaaatacctactttttgggaaaaatatgccattatgagcagaaactggtgttggccaaaagtattttgttaacatttgctaagaactagagcacaggatattagaaactgggaattattcttattggttggggagagttgcgcttattacctatgtttctcttttactgtagccctactggaacacctattccccagtgtcttgcttaggttactagatccccaggctgattagagagtaaggagaagcttgggcctaaaaatgttgctaattactgtcagaatcaagttaagaattaaaacttactaacttctgatgagtgctctttccattttattatgctgcctgccttaataccagtgtttttcaaacagtagaaaccgcttataaagtaaattcttacatagaaacccagcatattaaaaagataagaacgaagctgttctatttgaagccaaggtagaaagtgtaaagcccagatcattaagtcttctctgcctctcttttcctttccctaccaggtaacgctaaagaaacttgagcctttacatagtatagttttaatatgcacaatatactgtagagtttttaaagtcatgcatgtttctgtaatgataattacctcattgaatatttttcttataaaccattttctttgtataagatcttgatgttagctccttgttcagcccacagtacagcaaacaacatctctcaaagtatagtgagcatttcgtttcatgcttcgaatcctccaaggcaggatgaaaaccatcttaaggagctggagagggagtttgagaagggcaaggagtcttgtgtagtgaactagataccccatttctaatatatctaccttgcaccttgtgcctctggtatacgaatttgataaaaggtgtatgcatggaaatagaagaatagtttctcaactcattctcaaagttactaaatgcttgcctggaataacatatcttaagcacatggccctgcttactcactgcttgggaatcacaccacagtacttacttctattccgcagccttatacatttgtttcttaagcttagagatgatcatgacattgctgtgcagttttctgctgcttacttttaagttgaaatctcatttttgtttcagattctccttcttctgtggttaacaaacagctcggatccatgtcacttgacgagcaacagggtgcgtgcaacaggagatgcgctatgcccatccatccatagctttattgcaatgcatatactaagctctctcacacctttcgtagcatttcattttgattatggtcttatagtcagtattttgtggaccaaattacaataggtggtattgtacataaaaggtctttttggcctatacagattattttctatgtaagctcatttctcactttggcccttgatgccaactttgaactctctccctataacaaaattataatggatacaaactatatccattttttaaattctaggtatctgtcataaaattgtgtagaactgtgggtgtgaggttaatactacctcgttgcttatgtaggataagttatttaaacacagtgatattctatattactagattgctttagtaatgatacttggttttatgtctcacttatctggtagccaaattcctggtagctttaactaaagactatagttacgaacccagaggtaagctcaaaagctgtcagtcagaagctcccacttccacttgtacttttcaatgtgggaaaggtatagaatcaatctccaagccttgaatagagcctgatgaaatgaacgcgttacttatttatcaggctttattactagcgatcaaatatagcacagagaaggattagtagaggaagacattctgacatgaagggacatctgaaaaggctggagataggaagactaaaaactaaaaaggctatttagtgttagcgcaaatgttttactatctcacctcagaatttaatgaagtattttaaatatattgtgacaaagtgtgataagtaatcttagttaagtctttaagaatgatttaacacgatattcactttctctatttaaaaaggcagatagctggacgtggtggcacacgcctgtaatcccagctacttgggaggctggggcgggaggatcacttgaacccagaaatttgagaccagcctggtcaatatagcgagaccccgtctcttaaaaaaaaaaaaattaattagctgggtgtggtggtgcatgcctgtagtcccagctaatagggaggctaaggcaggaggattgctagagcacaggagttcaaggatccagtgagctatgattgtaccactgcactccagcctgggtgacagagtgagacccccatctctttaaaaaaaaaaaaaaaaaagaacagaaaaaaggcaggtgattgcctttatatattttacaaatgttcctttcaaaaacattttttaaaaaattagcactaaagccataagatttggttgactgaaagtttacatattagatgactcatatgtcaatagtaatgcagaaattaaatattgctgtacttacttggtgtgaaatatatgtaatttaaactatattcttagagaaatattcagaaactaattttaaagtgaattagaaaacttcttttgtacttctgatcttaaattattccttatggggccaggcgtggtggcccacacctgtattcccagcacttttggaggccaaggcaggcagatcacctgaggtcagaagtttgagaccaacctggccaacatggtgaaaccctgtctctactaaaaacaaaaattagccggatgtggtggcccgtgcctgtaatcctagctactcaggaggctgagggaggagaatcgcttgaacctgggaggcggaggttacagtgagccgagattgcgccattgcactccagcctgggcagcagagtgagactctgtatccaaaaaaaaaaaaaaaaaagattattccttatggacctgaggtgaatttctgatcttaaattactccttatggaccttagatgacctgtattactataaggttttctgttcttgagaaagaaagaatgaatgaatgaattggtaaattaatttgcaaactaaggaattaagcatgtgttattttatatgtttattacagaggtattaacaatgaagaataattaaggcaaaatacaactatagcctactatattagactactgtatataactactctataattaaaggattttttttctaaggatatatggatttaataatatatcactatcagagattttatagccagatttatattctagttaatcacatacaataattttcatagcattacatttaatattatattcaatttaagttgataatttacatatgatatgggatataagaggaagagaaaaattatgattaactcccagattttttacatcagtgcctgggtagggtaaatgataaggccatttactagggttgagtagcttggaaatagaaatcaggtggttctttatctttttggctatgtaaagtatgatatacattttagtcatgtaagtagagttgctatgtaagaggttagtattgagtggctttggcagaagctgcaccgtagtagactatcagaaatgtagctttgtaataagacctctgagcagaaatgttctaatggtggaaaatatatctaattaattaaatcctgagtttttacatacctttttgttcatcagcattataacttttaaagtactaggaacttcacattgcaggctcacattacctaaagataacttctaaaagttaatagagactgcccaccaccatttgtctctcctagattaatggaataatccctttactagtcttctcacatccactcaggctatagtctattctctaccggcagccagagtgaaacttcaagatgtaaatataatcatgtgattcatctgcctaaaacattttaattacttcccatagcctttcaaaagaacccaaatccataccttggcttacaaaacctacatgacttgatttctgtatctctaatctcgtctcaggccactatcccatcattcactaagctcttgccaaatagacttactttcatttcttttacatcccttgtacaggctgtacatctcttgtacatgctgttccctctaccaaaactacttttttgttgagcaatttctactcattttttaaactcactgagatgttactctcaaaaataatataacttcacaatctctagtaagtctcctctttttcttcctttgtgacttgttatttttcctcattgcatttgtcacatttgtaatcatacatttatttaggggattgtttaatatctacctttttgcatattctctaaatattttcatttaataatttcctctatgcctaaaatcatacatcatgtggtaaataatattcgttaaacgagtgagtaaatgaattctttaagcaattatttaagagctgtagggattacttcagcttgggagaaatgtgatcagatttacatattggaaagatcattttggcaacattataaatgattggaaggagtaagattgaaaacaccaagaacacgtaagaggccattgctatagtccacctaagagattatgagggatccaacctaaggcaatagtggtgagaagtgggaatggacagattttaaaaatagttgaaaggttgaattcatgggactttgagactgataagttagaaatgaatgagagtatgataaccaggtgtcttgatagggtgataatgaaccatcagccaagatagagactttaggaggaacagctagctgatttgaggggagaagaaagtatgtgagtttttttttaatgttaagtttgaagtgtctttggatatccacgtggagagatctcatagatggttggatggctatatgatgctggaagtcaccaaagtgatctgaggtagaaataaaggtaaggaatcattagtttatagatagcagttgaaaccatgggagtggatgagattgtctagaaaaagagggtagtgtgagaagagtagagtgcactacaggagcaagtagagaaaaggatctagctaatgagaccaaacaggaatgatgagagaagtacgcagggcagaaagaatgccatatccaaaaccaggagaaaagaagtgcaaggagggacaggttagtaatgccatgtaaatcaatgataccaactcccagaaagtctgataaatcattttttaaatttggcaacgtgattgctttgacattgtagtttgagatatgatgtagtggaagcagaagccagatagtagtggtttgaggagaaaggtttgggggaaaaaggtagagactttgttatgtctcttttcataagcccaattaagaattgaaagagcaaagataatgtcaggtataggtggtggtaggttcaaaactgagcatgtttatagagtaaacagattgtgtgttcaagatgtaagggatagttgatgtccccagatatgctattatttcaaaattttaacctttaccaagattcttgttctcagttttaccatggagaatggaaaaagtagtacatttaataagtttcctatttgaatatatctctgactaatgattatttcagcatattttaaatttgtttttcatacttttaacaaaacacgaatgctttttaaaaattgatagttcagttttatgtttatgtcacaaaatatttcttcaccattttccaggtgcccaaatcattttatatgttgtttaattttccatagcattttcatagatttctttacttggaaggattaccaaggacaaaaatgttactaataaatttttttaaaaattttagtggacttggttactgaagaaatttttttctttgaataactgtatacacagtattaaactggttgagtgcaactggtgtctttgcttatttatcctgaatttttaacaaaatcacaatttgatagaagtatgtttagcctgaatcttcattcattaatgcagctccctggttgtctcaatagttttactttttttaagaaacaaaattgtagggaaataaatgtataacatgcacattgttattaattgtatcctattataaaataattttcagtgttctccaaatttggagttgtgtgtaaacacattgatggcctttctgtgctaattatgcataaagtgaaattctgtttgaataagcacagtaatgtccatcatgcatcttgtttagtttcaacagtatgttttaatgggtagttttagttttcctttttatctctctactataagaggaaaaattctcttctgacatatatttattttaccttgtttatattattaaaacttaacaaatttttcctcttaaaaatatgtaggccagcaatttcccccttattttattttaaaaaataacaacagcaaaaagaatatgtaattgttgttttgagaacagttaacttttgagaggatataagaaagtaattttgtctgagttttaggttttggccatgattgaaacaagttgctttctattccttacagtgattccattaagtggaagttgacagtgccatcgagtttgaaacttacgtctgtaggcagttgtgcatctgcaggcactaattttctgttatagatttaaagaaatataaacactaatttgtaggtatgaaaaatatcaatgttaattttccactatgtatcattttatataagctgactgtctttgatgtttgtgaaacattcatctataggagactagtggataatcaaaaaccagtgaaacagatttttactaattctactaaggtagattgggaaatggaaaagttggacctgccatgcattaaatatgtattaccttaagattatatactatcaccaaattgaaatttcattttagtactattatctaatattattttaaacatattgacaattctaatttttattaaataaatatctagtgattgaagcttgctgtattaataagaatataagttcagtattccccacactggaatacatccataaatagtatattttaaattctagtgaaataataagttagtgaaataaaatttcattctaaattctttgtatttcttagaactagttatcacttagttacttggaatgaggtaactaatttcttcctatccccaactactaggtcttgattgttccaattaatgatatatttgatcttttggaagttaaaccctatttaatttttttgttgcatatgctcgtgtgttctactcttctgctgatcaaacctatacctccagtttgtttaacttagaattgtcttatcataaaaataactgacatttattgagttttttgtgactagcactgtgttaagaatttaacatgcatcatctaatttgtgctaacaatgaggtgaattatcttaattttactaatgaagaaactgagactccaagaaatatgtaaagatgagtgaaataagtggtggagccatatttgtatgtctgtacttcattaattcaactgatacgtaaatgcctacctaccttgtggcaagtactgggataggtactagggtgcatgaataaataacactactgtcttctgtactgggagcattgagttgatttataataataacagcaacaacaacataagacacttaataccacattttctttgtaccaaacattgcttggagcaattttttatatgttaatttacttaatccttaccacaaccatatgtagttggtgctattattacccccatttttcagatgaggaaactgaggcaaagggtggttaagaatcatgtctaaggccgggcgtggtggctcacgcctgtaatcccagtactttgggaggctgaggtgggcgaatcacgaggtcaggagatcgaggccatcctggctaacacagtgaaaccccgtctctatgaaaaacacaaaaaattagccagctgtggtggcgggcacctgtagttccagctacttgggaggctgaggtgggagaatggcgtgaacccaggaagcggagcttgcagtgagccgagattgcaccactgcgctccagcctgggtgacagagcaagactccgtctcaaaaaaaaaaaaaagaaaagaaacatgtctaaggttgcacacagctagtaagcgttagaaacgtgtctcaaacccaagaggtctggctctggcatccgtgatcataaccacttgctttgcctgatctaacagtaaagatggatgaaaaaataaatcaagtgtgatgagtgttatataagaaaggggaaatagcagggttcagtgtggaacataggagagtgggccttcattccctccagttgagggccaaataaggcatccctgaggaagagacattaagctgagatctgaaaggtgagcctgaataagttaggtgaaggagcatgagtaaagggaagcatgaatagcatattgcagagcctctgagatgccacatacaggatgactaggagaacctcagtatgcaggacaaagtgactttttggacatttttaggtttcgcatttttattttaagaacagagggaagctaatgaagtgtttaaattagggagtatggctatggcctgatactctgaatggagtatggagaattgattagagactgaatcacttacgaagttctcctggtaatagagattttgatctggtgataaaagtaaggtaggagagatgtgaagagattcaagaaatatttaagatgtagaataaacaggacttggtggtagattgaatgacacagggattgaggaggaatccagagtataagttgcagtaacaacttcagaattttcttatgtagatagtttagtaataaatagcagtctgcagaggccaggacttgtgtcttaaatcttttgtaaaacaaatacactgtttttacttaggttatacatttatttatagtgctttgtgggaggtactgttggagattaacaggtgactttttcagccactgcaagagtagctcatgttttgattgagcacaactaagtgaatggctattttcttaaataggtagccctggaaaagggatgaagcatgggcggggacgtgtaggggtaggtgatcatgaactcggttttgaatatattgagtttgagttatctgtatgagatacccaagttgaaaatcggttgggtagttgattgtgtggatatagagctcagaaaagatatcagagctcaagaaagaaatttgggagatttttgcatacagatgttaactgaagccatgaagttagatggaattttaactaggatgaaagtagaaagaagaggacagagtaagagagctaaaacatctcaagaaaaatcagaaaaattctaaaattaaaagattttgccagcgaagagctggtaaaggagattgagaagaagcaactagagaggtggatggcgacatagaacagcgtggtgtcttgtgatcaagagaaattttcaaatacgagagtgttgtctgctggaaggtcaagtaaattggctccaaaaaaattatcccctaagttaggcaatgtgggagtgattgagcccattagtagaacactttcactagagtgatagagacataggccagattttagagcaggagacgaaaaaatggaaatgagaagaaaagcaattcaaaacaataagctaggaggacagtaactggaaggagaagttgttaaagggagtgttctcctaaactgtctacctcatttgttttcacttggaagtcacattttaacttgttaatttatctacaaaatgagagtgttatttatgataggcagacttgattttttttttttccagtaaaggagaatatacctgaggaaacagtcatgaaaagaaatactggaaaaggattttggcaggactcatgtgccacatggcgtgggcgtatttacttattttcattctatactgtcctccctctagactgaaagtgagataggaataggagacgtttatgaatagaggtatataaaactactggttctgaagtaggagaaaaggaagcaaaggtcaaatggctaccacatttcaacccataaattctaaatactggtaggaatgtggaaccaagcacagtttcaatctaaatgtatcgaaatcacatatttaagttcaattcacacttctatgttatgtcatgaaaaaagttcttgggttaaaattattataattgacatagagttgagttgtgattgccagaagaaaatttgactgaatgttaaaaagattagagagaatggacttcctaataaatatctgtactaaaattgcactttgtttcgttttggcttgcatagtatcacttctgttttataaagccagatttgcactagtgtaagcactcaatttttagaatgaaatgtgttgcctcacagttatctgtagggtagatagatcttctctgttagcagtctactcctagaagcagcatctccactttgaatccagatatgcttccttatacaaatagttggaaggagaattggagatcctctaatctggaatctacaaaaaagttgtggattccctgacctatgaacatggaaaattttgcattggtttaaaaactgtggttgagaaatttgccttttctatacaagtctagtaagttggagtgcagaatgtggggagatagttaaactttattattttttcagaatatttcaccatatgttttatttcgaccttactttggtttttaaaaaatatttggtataatgaagtgggaattagaatatcattatataatcatacacacatcgttatacaatagaaaactcattaggtaaacagtgttttattttcacatgttccacagcttatctaactactatagttaattaatgtatgattataaagttataatagggacccaacagcagagaaaaatgttgggcatggtggttctaaagaaattattgttgctataccctagttaattatcttcattttgaatatttggtttagatttacatatgagatagattctccaggggtatcccagcttaaagtctgaacgtccttattagtatttggatatttagatctataccaacattttgaacagtatttaaatatataaaatactcagcatttttttttttactatggttatcacatgtgtttttgtatgtctttgagcatcttttagaacctcatgattataatttcgtagtggaaatgtacagattaaatcatttcacagcgtgtgcattacaaaaaatagttactttgtgattcttatgcaaaagacttgaaagatacctaattaaatacataacagttcaaggaaactgctttcaaattatatttcagcttattctgaattttttttctgagccaatgcactatcctgagaggtctctagtagcatttctgaaaaggatcttttttttttttttttttttttgagacggagtctcgctctgtcgcccaggccggactgcggactgcagtggcgcaatctcggctcactgcaagctccgcctcccgggttcacgccattctcctgcctcagcctcccgagtagctgggactacaggcgcccgccaccgcgcccggctaattttttgtatttttttagtagagacggggtttcaccttgttagccaggatggtctcgatcttctgacctcatgatccacccgcctcggcctcccaaagtgctgggattacaggtgtgagccaccgcgcccggcctgaaaaggatcttttaagttggtttcctgaatctcaagttacggacctttcacttctaatcccccaaaatgaagtcctttacagtcttttatcttgatgtttatgtggtcattgctgtgcttctgaagcatgtttcaaataaatggtaatttgcctccatagagaccactctaagctgctgatgtcatcagttgttcttaataaccataattactgagcaatatagaatcgctatctaaaaacttagcagtgttgaacaagttaaaagggattttttccccactatattgtgtgtgtgctgagcacactacaaataaatattctcctgtaatgtttttagaggaagaaatagttcagtctcttaagtgccctaaaagaagatacaacatagttttcctatactatgatgccaaagtgataattttggctaccagaactcttaaccagttattaatgttgttgatatgaattatttatttctgaggagtaacaacatcaacaattgatatttcttaattaaaatagttacttatctaagtaatcttatttttgtctttgtagtcagattatttctaagattgtatattaagtaggaacttcatataaaaagaaacctcagcgggcacagtggcccatacctgtaatcccaacactttggagtgctgaggaagcaggatcacttgaggccaggagttcaagaccagcctggacaacatagtgagactccatctctagaaaaaataaagaagttgggcatggtgacacacacctgcaatcctagctacttgggaggctgaggcaggagattcacttgagcccagaagtttgagaccacagtgagctatgaaggtgccaccacgctaccgtgggtgatagagcaagaccctgtctatggaaaggatggagtgggggaggaaaagtccgtaactagagaaaaaattaagcttattgttttcagttcatcatctgtaaaatggagatgacaatactgattacaaagatttttttaaaggaatgtatatatcttggcacacatttataattgatgtatattcatagtaatgctcaataaattatagttattaatatgatagctttctacataaagctatttgtgtgtttacttgaagttctaaaccttaagggttttaaataaaaatctaccttttaagtaacatatctgtgcattatgtaaataagactttgaaaaatacaatttttagaatgtgtttgctgatccaacctctgacagagaagttgggaacatttaaatagttacaattttttttcaaataaagtaaaaatatttaatttttaaaatcattaaagtaggtttttcttaagacatttgtagtttagaatatgcattttatcacaaagagtgaatgcattcattagtagtccaggaatcctaattcctgagaaaatgtaacctgataggttgtatatgaccaagcaaactagaattaaagaagacagtgaaatggaaaaaggctaggagatgaatttaaaccttggaatatatactgtcactaatactgcagttgggccaagtgcggtggctcacacctgtactcccagcactttgagaggccaaggcagacggattgcttgagcccaggagttaaagaccagcctgggcaacatggcaaaaccctgtttctacaaaagttactacaaattagccaggtgtgatggcatgtgcctatagtcccagctactcaggaggctgaggtgggagaatcaccttagcctgggaaattgaggatgcagcgagccatgatttcgccactgcactccaacctggacgacggagtgagactctgtctcaaaacaaaaacaaaaacaaaacaacctggagttgaagaaaccaggttcttcattgtgttgtctttctgccagagacactgtttacttaagtgtaggctacgaggaaataactacactcagggacctgaagtttttgtgactaacagaagagttcatgttatttttatagtaataggctagttttacacaaggctgatgaattcattaacaacttaaatgaacaaattctatcaactataatcaatcattttatgattaaatgaatattaccaatatttgacatgttttgtaatatgtagattatattcctgagagattaaataagaactctgtaggccgggcatggtggctcatgcctgtaatcccagcactttgggaggccgaagtgggtgaatcacttgaggtcaggagttcaagaccagcctggctaacatggtgaaaccccatctctcctaaaatacaaaaattagccaagtgtggtggtgggtgcctataaccccagctactctggaggctgaggcaggagaattgctggaacccgggaggcggagcttgcagtgggccgagatcgcgccattgcactccagtctggggaacaaaaagagcctccatctcaaaaaaaataaaaacaaaacaaaacaaaaaaactttgtagtagatactgtaggaagaaagttttaattatcattaaccatcttagaaagcttcttgcctttggtggggaacctgtataaatgttttctgctctgttctgatctcttaatagtttgtgtaatatattcctatagtcatagcatgtagatatctataactgtctcttaaattttcctgaaaaggaaagttttcatatatcatttaaattccacaaggcttctcataacttaagaagtcttaactataaccaaggtggatctgagaaattcagtcttacacttctctcacatctgcttttgttttctctactgtctttaccttaaaagaaaaataaacagcaaaacatttataaaatattaagagagaaaatgaaaaaactagcccgaactcagtctctcagtttccttaatcatccaatcatccaatctttagctgtctgtttcatctattccagaagcctaaagacagcagtgatgaaacaaaaatctcagtaacataactaaagaataagaggaaactgtggacaaatgactagcaaacagcaagtttttgaaagagggtcaaggatagggcagatgtttccttaatacatttctgtaagctaaaggtctattaattcagttatttatcagaatgccatttggtaaaatacctcctctaaaacactgaatgtaatactaaatctttgacagttggaatgggttattagtttatttccaggagttgtttaaaagacataatcataacaaaaatagtacagaaacaaagtgactttaccatttgggatgtcaggtttataattcacattattttcaaatagcaattctgtaggacaggatttttcatgagttggaagttaagacagaggaattgatactaagttttgttatcagcttgactcttgtggaatacttttctactgcatttctgtatttgaagtcttgttaattgtcctctcacagaataaaggctagaagagaggttctatgagattctcccccccctttttttttttttttttgagatgaggtctcacccagactcgactcgaactcctgggcttaagggttcctcccaccactgagccccgctgagattctcttaatgtgtgctccaacatcttcaagaggaatgaaaaaagatataagtccttcattgcaatagaaagtagatccaataataaaaaaaaatcctaagtatatttgcttttatgaaattgtgattgtctttgttatttttcaagagaagtttatttttagtattaaatcagtccttgaactggtatcaaggaaaaagatatctcacagaagagttttctttctgcaagcaactggcagaaatgtgacatgtttgattatgtatccatttgtattccctatgtattttaatgtttcccaaactgttgttcatcataaaatgaaaaatatgtaaagctctgtttaattatgtctttgcatatccatgtactctttttttttggcaggtggggaaggtagctttaaatactctattaatttgtgtaggctttcttgattttgtcatttaaaaaagatttcatacattgagatagatgtgtattatagacatcatctataggctcttaaaatgaaattgctgtttccacaattaaacaaattccttgcaagattagtcaggaagagaaacggaaatataccaaaatataacaaagtatattttagaaaatatcaaagcactataaataccaccctcttctccatcaggtgcagactgtgattcctccctaaattatagatctgtgagtttgaaagaacagaaggaatttgataacatttcattgcagcaaagtttttgccaaaccgcttttcacagagcccttgtatcttacatctcagtgtttctgaaagagccaaaattagttcttattgatgctcaagcaactgaggaattatgagcattccattaaataagggtaccagtttgtaactatgtcattgcatgttaatactttttgattcccctaatgactaaatatggttctcaatgtgtgtgatttccatctgaatcaaagggagtcatgtacacaaagctagaacttgatgtagtgctactttgaaatataaaagagtatttccacaacacatgccttcaaactttaaatgaaacccataacagatgtgaaaaaagaattatgacaaggacaacctaatataagttttataaattttaggaaatgtcatctttttactggtttcagagactttttcaaatgttttaaacacaattttcagataacaataatgaaaagctgagccccaaaccagggacaggtgaaccagttttaagtttgcactacagcacagaaggaacaactacaagcacaataaaactgaactttacagatgaatggtaagttaatatttttgtaaagatgttcttagccattttgtaggattgtattagattttaatttttaacacttcgtcatctttatgttttgttttgctataaggtattggttttcaaacttgagtgtgcttcagaatcactgggagagcttgttaagatgcatattactggaccccactctcagaattaggtttggagtgggggtctgagaatttgcatttttaaaaactttccagatgatgccggtgctgctcatcctagaatatttcttctgatagaaaatgcaaaagataatactaataataataattaaaattagtgcaaaaatataaacattttgggactttttgcagtcgtggtcctaggtaggtgtatatgtatgatttttgttttgagttttagaatataattttagtgatactaaatatactgtattctcccctgcatttgtttgactttataataaatattcccatgttactacttagttttaataaatattattttactagctgtgtaatagtccatcaagtagatgttctatagtttacttagccattttcatttaattgggcagtaaatttgtttaccattttttaccaaataaggctttaatgaatatctttgcttataaagccttttcctgccttcaagattatttgagagatatttctgaaatgaactatatctagattaaaagatattgccaaattatttccaaaagaatctttacttactatagtcctactagacacatgtagaagtatacgatttactgtctccaggctagtgttcaatatatttatttatttttaacttctatatttgatttaaaaatacttttagtatttaattgattattagtaaggttgaactttttctttatttaatggtcatatagcttctctttaataatgtttctgatcatatttattgctcattaatctaatgaaactttacatttgagaaaagcaagttatgtaagctttttatactctttcccactatctcatgaccatttgaatgagagagcatacaaaatttttaaacttaggaatagtaatctattagttaatatattgatatagtatttcttaatatataatatagttgtataatatttgttaatatataattataccaattgtttaatgacaatatattaattattcataattaatatattaatatattaatatattaaatatttaattgtatattaatatatgatcatgttatctgttactataatatatgtaatataatatagttatgtattgtcttaatatgtaatgaattatatgttgatatgtgatattacttttatttaaattcactggtttccatttgtgtttatgtatgtgtgtattttatattaaaatatttgattaagtaggatcttaaaatactattggatatcttctatgttccggggactattctagacattggaaatacatcagtgaaataaagtacttaaaacccctgccttattggaacttacattctagatggaggaagtttattataaacataattaataagtgtaccatatagtatgttagaaggacaatggaggaaaatagagcaggtaaaagtgattgggaaacctaggcatcattgagaaggtgacatttgggcaaaatgtcacttgaagagtgagaaggagtgagccacgtatttatatctaggggaagagcatttggggcagagagaaaaccagtacaaagactctgaagcagaagcatcagacctagtatgttcaaggatcttaagaagaccagtgtagcgggagtggagtgaccagtggagagaagagtagtagataaggtcagccaggaaattgaggaggatatttaaaaggaaaaggttatttctggttattgtgttgagcatatgccatcagtagaaaccagaagaacagttaaaaagctatggcagtaagaaaggtgagaggtggtggtggcttagacaaggatgggagcagtggaggtggtttaaaaaaaaaaaaagtgatgggattctagatatatatttgaaggtgcagccagtaggactttataagtcttagtgcctgaccatttaaaaattgtgatgtttgtggccctttttcttaatacataatttaagatgacagtaggtcatcgtacttatcacgtcttttccattctcatgtttctgtacacaaggagctggcatcttctgaagaatcttatctaaactttttgggctttttttttttttagagaaaatcattagtcccattcttcttttgaatgctacttttccttctctaaaaactgaccatgaattatattctcattcatcaatttcttatttctttgtcagaaaagcagttagcattttttattattatgcaagtattcaacattcattgtaaaaaaaaaaaaaaaaccaaacaggcagaacttaaaaaaaaaaagtatacagactttttcatctatatcaggattgtctcttgcttttattttagtttctttggcaacagatgaggcaatagaacatgctaagagcttggactgaaattgacaagtttttgaatctctctaaatctcagttttctcccttgaaaacgggcatgtttaatagaacctacttcataggtttagtatgaagatttaatgagatcatgcagagaaagtacgtagcacttactagcacattgattggcacctgagaaggccctcattgattgttagctacagttctcatcttttgtaaattgtctttcagatactttgcccagttttctatggtgtttatctttttcttattgcgttattagagctatttatttattatagaattaaatgaggattataccatttgtctttcatttgttgcaaatatttttcccaatttggtgtttgtttttcagtttacttacagtggttttgccttatggtttctgcctgtgatagcatgcataggaaagccttgttattcctagaattaagggaaaaggttcttatattcctctcatattttctataatttagtatcaaaaactgtatattccttctagaatttattttcccataaagtataacgtgaagccatagctttggttttaccacatggctgttttcttgtctcattaccatttattgaataatctttttatttctgtgtgatttaaaatgccatattaacgtatgttaaatatatttactcggttgctgtgtcttttccactaatatgtctctattcctactcagtaccataatattttaattactataatgtatacactaagcgttttattcatgcctgaatcatagctttctcaatggaaaaaataaatatatatataccaccttagcttttttttgccaaaatagctatatattcctttctggtttaaaagaaatacatgtttgtcgcacacacacacacacacacacacacacacacacacacaaattcagtataaaaaatttacctgcagtaattctactgacatgacactcaacactgatgcatagccttcctgacatttttctctgcatatatacacccatatgaatatacagttttagttaaataatattatatatgtactctcttttttttaaaaagtcaatttgacttctgcagtcagcctaaaagagtttttgtcatggcaaaaagtccatgatcgtttgtattgtttattgagttactggtatttgtctataattaatgtttttttaagttactgtaaatcttactttttttcttgttcacatttattttaaacttaaagaattgttgcatttctatgaacttaatttaaatctcagtcagattgttatacatgtcctctttctcattcagtcctcttgttacacatatgccatgatttgtcacagaatacttattgaaaattatttctttaaaaattggcctcgtattccgctatagctagaaatgctaatagaactatagtcatcatcaggtgagtattaaaactgaagcagaaaatattaccctgtccttctacagaactatgatgctcagtcacctgccatgtttgaacagcagatcagaactggaagtgatccacagggagcagttcaaaagaccaaagaactggccaggcttttgttcaaatactaattttaaagtagcctggaataacagagtctagaagggcatatgataaaaatctgtataaccattaaggttttggatatggtgaaccatctgtagtgaagacaagaaaggagacaatgtagttcacttaaaattcaatagagagacatgtagaaatacatactagataatgaaaggatccaaacagtgaagaagcagtccctttatatttttgaattttttttcaagagtaaagtgtgttatgatagtcatcttgatttgtttgaaatgatgtttacaaatgctattaaaattataaatcctacattttacttgtgaattttttggtctacctttctagttgtaaaatataaaaatcctaaaagatcatattgattaacttcttggtggaatcacttatcttgttttgatgataggagcagtatagcatcaagttctagaggaattgggagccattgcaaatctgagggtcaggaggaatctttcgtcccacagagctcagtgcaaccaccagaaggagacagtgaaacaagtaaggtgttattttgcttttgttgttataaaattgcagcattggatgtttatctactttcctgttcccttcgatgctgtattttgtttcttgtttttaataaattacttttgcttctatagtccagctgttaaactgatagatagcaaatccaaaagatggggaccttaagcagttaaaatgaggagacacagtgaagcacaatcctctttgtggacacagtggccaggatagttgttcatcatactataaatggatgagatataaatgttagtttgaattagtctttatcatttttatacctagcaatgaaatccactgtatttgttttggttgtatatgtggtttatagagggggaaaaaggaatagaatctaaacaagttacgagtgaatctatttaatacctgaagtgccacttaagggatttttcagaacccttttctaatagaatatttttatatgacaattacatgaaatttaatgtctagcacagagactagaacacagtagatgttcaataaatgcttgattaatgaaggaataaatgaattatatttcttataaatgtgtaggtaccttagtataacagagtttaaaattaagtatgtgtaagacagctatctggtaagcaaatgtccagtaaggaacattaaagactgatccttcatgcatctgacagttaaattccagaattaagtattttcagtggccaaaacagaatttatagtatggtcagcttaactacttgttcatgatagtttagattttaccaaatacatgatagaggggcagaaaaatgctcagttttaagtttagatttcgggaaggttagtaaaatgcaggatcaggtaatttcagctgtaagggatagtctaaagcagagattctgcacatagagttcatgaagctcaattcctgggcttcaggaagaagcagtgggcccatccgtccatgatagtgtttgtacaattttgtgtgcaaatacatatttgccttgtactgaggggaggttttagctgaatgtcaaaggttcctatgactcagaaagggttaagaaccatttatccataggaaagctggagtattaagttgatgtttacttttctaaaaaaatctggatttaatgatacatttggccctacatgcccatggattccatggaaatactccctcccaaaataacaatatgacaataaaaaggaacatagatttaaaaacaataacagcgtagcaaccgcttacatagcatttacattgcattaggtattataagtaatatagagataatttacagtataaggaagggtatgcataggttatatgcaaatattatgccattatatatgagggacttgaggagctgcagattttggtattttcagcgattttagaactaatccctcatggataccaagggatgactgtaatttggtttacttacagaagctcctgaagaatcatcagaggatgtgacaaaatatcaggaaggagtatctgcagaaaacccagttgagaaccatatcaatataagtgagttgctccctttagataattgctttgtatgggaaaataaaaagccttaatctatgttaatctctctatagttagaggccatgttcaagtgtattgtggaagtttcctccccttatagaggaattagacatcatattagaatgtgtttgtgagctcctaagttaggttaaataattagtattgcccacattaccacctgttacatacaactttattttctgacagcacaatcagataagttcacagccaagccattggattccaactcaggagaaagaaatgacctcaatcttgatcgctcttgtggggttccagaagaatctgcttcatctgaaaaagccaaggaaccagaaacttcagatcagactagcactgagagtgctaccaatgaaaataacaccaatcctgagcctcagttccaaacagaagccactgggccttcagctcatgaagaaacatccaccagggactctgctcttcaggacacagatgacagtgatgatgacccagtcctgatcccaggtgcaaggtatcgagcaggacctggtgataggttggtaaatttttaattaacatgaactgtaaaaaatgtatttcacaaggatttgtttgaagtcattgaagggaatctctccatttttgacagttgcttcctctaagagtgtctcattcatataaacttaaagaaactttacagtttactgtaaatgattttacgtattatattctttgagcactgtgcattaatagggaaataaaaagtcttcattctccatatctctagcactgaggcttgcttctgaatttacagatcaagagaaaagaatgttaagaatgacccacaggttatttatgaagtcaaggttatacttagctctcagattatcttgtagatatccaggcctttatcagtgttgttttggttttaatgttaattttttctgcttttctattgaccctggattaaggtagtgtgttagtagttctgtttttgggaacactgtttttctttgatttctactaaacttagtgactgaatttagaaaatgaaaaattataccaaataaataccatagcagcaataaaaaattgaattgccaacatgtttttatagtttttctatattttatgtgatcacaaggatatattttcttttgtgggagttaaaataaatttttaaagtatactgcatttcatactcatggaaaactatttctattattagtgctatcatatcttattgtaagttctgtcctctttcagagaacctagttttaatcttaaaatcctagtttacaaaggagtgagattctatttgaaatatttcacattttatatgctcaatatattgctgtttataagataccctaaagtatctgtcaactgaaaaatataatgaaagattaatttaccactcatagtcaagagcatgatgatgggtttgaatactggtttcaccacttaccagcagtgttttttcattcaaattacttaatgactcttaaagattcagtttcttatctataaaatagggttatgattatctaaaattattgtaagaattttaaaaaaatctatcagtcaatcatgatgtgacctggctcatgttaatagcactaattaaatgatagctgtattaaacaatcaagatagtctatgaggccactttaatttttaaaagaattacagtaagaatgactctagggataaagactgaaagaagacaggcaaaaatcctgaagaggatagcttgcagctcaggggaactgccttttcttaactatgaaagggtatgtttctttctttagtcatatttgggaaatgtttactttgccatggcactttttttgtagatatgaagcaagaatttcccatgtttatacttagagattaatcaaacatcttctctttacctgtacacagtaatcttgagcattcttagtatatattttaggcaagtaagacttagttctatttctttccatacccagagggagttccttagaatgtcattaccacttaatttatgcagatgaggttagcaagcttagcacaatttgaaaatcaaactgataatttccaaaatcaaactgataatttccaaaacccagggttgagagctagattctataattaagcttgtacatttatggccttccatttatataaatgagctaatgtcttatttttctacatttaagtagtagaacatgatacggaggtcataattgaaaattaaatttaagtgcccagtttctagtaatgtttttaatggatattagacactttgagaaagtcataactatttagcagcttctatgcaggctaattataacacttaataccaagcctgctttatagctgaggaaacttaggtgctaagcaaagggttttgtatattctagagctaaggagttttgttttttgaaacacagtactataacattaatgagaaaggaggatttgagggagggtgggtcctagagaatacagaaactgtaatctttctatagatctttatcatcttcataatacttagatgatttatatgttttagggattcttttagcatttagatctgtcacaaagttggttcccaatagcctcattgacccaaggaaacccagatgctgaactagactagcagaatcttttagaagagagataatcagtgacaacaaacagcctggaactgatcccacttcatgcatatactcttgaattcatactttcatggttaaatccagatttgaaaccactctgggatcacatttagttccctgctttttaaaaattaaatattatttaatattctgtacactcatttgagtatttagcctatgttggtcctacatggtattttgttttgtaagatatagtagtaaacttcctgaagagtaacagaagaacgataaaattcttatccttcaagaaacttaattatttatgaataagagagaataccgaagccatttataggaacatagaaaacatttaatatatgaaagtaaatacaattatatatatatgtgtgtgtgtgtatatatatataaaagatgtgtatactgaggtaattagaaagtgattagagtaacaattacattaattttcctttgagatttgcattattttctagctctttaccaaaaatttgtaaatggtgtaaatatttcctctgacttttatctaaatcggttattataattcttaacttttttggcaccatcctgatttaatcttgaacaactgtaaaaaagtatacttttaatatttctgcacctttctaagggctcttcatcattgacactcctgccagtttatcttacttctcaatttagctgacttttattctaaagagagaaagtttaagagattttgcttcttaagaacatgaaaagaatcacttaccagcttgtaattagtcctatgattttggagagtttctgtttcccaagagactaagggttgtgaagctctgttgtaacaatcataccatttggttcctagagtccaaggatacattgcacacatggatgaaatgcccacctaaaaggatgtatgtcttaaagttccctccatgctgccatttgcaaagcccagtcaatattagtttagctggggtagagaagtggtcctaaaattaaatattatacaagtgtatacttaatttgatctgtactttatatgaagaactatatagtggacctcatcagtttttgttccaaatttaatttttaaaaggaaactttaaaaggctttatagctaagtcatttctgacaaatttactgaaaatatcagaacagttccttgcaatacagagtaatgatttttaaaaaaatatttacattcttataatttggttaaataaatgacccaggttttcacttttgggctgagatcaagcatgagaaggaaatgtcttagaaaatgaagaccttaacaactaacatagatatttttaaatggaatgctcttctcattaactacagcaagtctatgtaaatgtaactgggagtctatagcagagcagcagacttactcctaaagagccatatagtaaatattttggctttgttggccaggagacaaaatggagaccattatggtaggtacttatatgaccatttaaaatattaacatttaaaaatgtaaaaactattcttagcctaaggttcatttcaaaaatcggcatttggcggagatctagcccaagagccatagcttgcaaatacctgctctatagtaatcagtgttatagagagaaatcaaactatagtctgtggtaaaatgcctctactggcaaaaatccagactttgaaacaatgaaataatatgaatctccacatatttgggttccctttaactttgcgtaaggcaagaacatggaacagtaaatgggaaataaattgaaaaaagacagaaagaaatgtttgttctctaatcatggtgtttaaaaaaataaaattagtcctaatgtcaaaaataagtctgacttaggaaaaaagcaaaacaaagcaaaaaaatagtatgtgtatcttttagtgattttatatactgtatttatttcattttgttttatttttttgagacagggtcttgccctgttgcccaggctggagtgcagtggtatgatcatagctcactgcaacctcatactcctgggctcaagcgatcttcctccctcagtctcccaagtagctgggattacaggtgcatgttgctgcactctgctaatttgttgttgttgttgttgttggtttttttttttttttttttttagaagagacagtctcactatgttgaccaggctggtcttgaactcctggcctcaagcctcagcctcccaaagtgctgggggactataggcgtgagccaccgcgcctggccatatactgggttaagaaacgtaaatatatgcccttggaatgaaaagagtgtggttgagatctctgtttagataatctgcatataattttttttttttttttttttttttttggagacggagtctcgctccctcacccaggctggagtgcagtggggcaatcttggctcactgcaagctctgcctcccaggttcacgccattctcctgcctcagcctcccaagtagctgggactacaggcgcctgccaccacgcccagctaattttttgtatttttagtagatacggggtttcaccgtgttagccaggatgatctcgatctcctgacctcgtgatccgcctgcctcagcctcccaaagtgctgggattaccggcatgagccaccgcacccaggctgtataatttttttttttttttacaatgccaaatctgttgtaagtgatttgacggcctgattggtagctcttactgtttctaaactcaagagaaaacctaaattactctctgaaaaaaaaaaaacaagcatctaagaaagcttcctgaataagtcctcacatagtcttgaatagtttttaattatagcctcagttaggatgatctaacaattttttccctaaagagtgatttatcctatattgccctttaataacttttaaagtgttattttcatagaaatttggttccatatacctactctggaccatggagcatagccctcacttttaaagccaaaattccttgtactgtaaatttggcagcatttattcagtcatcattgtaaccatgatttccttatttctcattattgcagtttactctttattaaagaaaattgcagagagaaaagatgtactcaaagagaaagaactggactcctagggagttaaaagccctgttattctttgctcatttgttatatagtcttgtggttaggccaagtgaattagcttagggcttaattatttattttccaaagagctcctcagctttgaggagcatgtacgtgttccagaggatggtattcattataagccagtgcagtttcccatactgtgacaggattgggttctgatttatttaaaagataaaagggattaagtgcaatgtcttccttctattctagcttcaatgagtgtttctgtttccttaatttcttcatatacatttagttgactgacatattccttgcttaatgcccgaagtcacaaagggaaacaaaagtttttttttaaattgagatgattgatgataaaaagggtgtccttaatgctttaaatatttggttctttgaagtctttgtaagtgatttcagttattgtgttcccttcactagatttaatatcagaggaacaacaataggtgatagaataatgaggtaattcagtatgttccttcataattttttttttatgatggatttgccaggtcttcttttgccacagctaaccacctttcctattaacagttaatactccctttggacttactgaattctaagtgctaagcattgtaaagcaggtcgctttccacaaactatatttagctgcatgcactgcatggggatagaatgaaaagaaatttcctgtgtgcagactgatgttcacttcaaatatgtcatatggcaaagtaactataatctgaaatgatgtactttaagtatcagttactctttttggatattttgttgaagaatgcaatttatgttttttaaatttgattgggataacaattaccaactttttgttattcgtatatgctccttttccttgagctcaataactaaaaatgtacttgaatctaaatctgtgtataggtttctgatttttgcaagaaagttgtttccttataaatagtttagaaatagtgtcacatatcaagatgatatataagcctcaagcacttctctatttgggacatatttttgagtagatctttaaagtgaacctcaatgacatcagtcacctactgaaaacctgttttgctgacaaaatcaaccttgtacttaactctagaggcatatatctgttatttaccatcagtttctaaaacagttgaacatgaaacatatagcaacaatcagaaatgtaaagtttgtagagttcctaatgaaaaatacagaagtcatgaaataagccaaaaaatataatagatgtatggaaatttctggttatggttcattgtcaggaggattctcatctacaagtctcaaatttgtttttgcttctcaaacttgttttgttttgtgctgttgtttctagcctgttttaacattaaggtatatttgaaataactttttcaaattattactagttatcactttctttttttttttttttccccaagatgtagccttgctctgttgcccaggctgtagtgcagtggcgcagtcccagcccactacaacctctgcctccagagttaaagtgattttcccgcctcagcctcctgagtatctgggattacaggcgcccacccaccaggcccagttaatttttgtgtttttagtagagacagggttggtcaccatgttggccaggctggtctcaaactactgacatcaagtgatctgcccatgttggcctcccagagtgctgggattacaggcttgagccaccgcatctggcctagttatcactttctgattaattgtatgacaataaaatggaatttgcttcagagttttttgatatcctgatttatactttttatcacaagtacgcaaagctggtttctggttttataatgaaaattgcaactataaagtaccatgatgctttaattgagttttagaaaagctgaaacactaaagtagagattatcatgaactgataaacaatggtaaagcagaaaatgtaacagttacctccctgtagagtgaatgaggtgagactcattcttctctacttcattttatttcttatgtagagattatctggtggaaacttctaattataaggcagtattttcctgccagtgaacacacatttgttctgcttctccttttagctattagagatgttcaaagaatgtaaacttctgcttaagatagacaaaattagaaaaataaaattatcacagatgtttatatctactgcccgttatgactagtcttcattagggactgtcttacaatggggaatgtgttctactataatctgctaagattctgaatgataggtaccatatttctttgaatagtaaataaaatggtagtcatcccctattcttcattctacttttattacctcatcacctcttacctggtgtactgagggagttctccaactccttctactcctgctttcagtagttctccattgtttatgatataaagaagaaacaaacccagcttccttgcctggtatatagggcacttcatattatagctgctgccaaaaattggtcatgctgtctacattgccatacttggagtgtcactgaatacattcagaggactattggagttctctgaatacattatgctgccttaagtcagcgtatctttacatactctgagccctctaacagaaaagacctcctatcactatcaccatcatttgggtcacctcatctttcaacatcatcttaagctacatttcctggcccatatattccctaatcaaaaatatgggcccttatatatacctactgtactacctatcacagtgcattgtatatttgtatgttttcatatataagaatgtaagcacctttaaggacagtgtaatacatacatgcatacagaaataaaagttggcaaagacacctttttgtcaaaaactctagctaactaaatttttattcatatctccctgcatgatatgggtttttgctttctttctctgcttcctaaaacttgaatgagaaaccagtgaattactgtttcaggggtcccacggcctccccacacagttgattgcttgctacaaagactcaaaagaatcaaaggcacttcaatcatggctatgatttattatggcaaggaaaaaagatcagacacagtggaagaatccaggctcagtgttccaaagttctccctttcagaatgtgcacctcccttcccaataaaatacagtaatacttctgtagtttttctgccctggtgaagcctgcttataactcaaaatccagggtgtttactggggtctggtcatgtaggcacctctgcctgtgtgcctaaccacagtcacctgaattccagacccagaaggaaagtaggtgttcaccacaaatcatgttatttttgcagtttacgcaagctggccccgcagggttgtgtcccaggcaggcagagcaatgtaacatgccaaaagtcaagttctcagacaccagccaagggccagcctcataagcagacccttctaaagatagcagcatcagacctgctatcccttacctttatttactaatacattgtaaggcaaagaatccagtttcttgcccccacaaaggagcagaaacagcaagatactctctagcaacccatctccctcacttatttcagatacttgtaaagatatatgttgaaatgacagcaattctaacatatagaacttttttattgataaagctagataacgctaacatactaatagtatcttagttcatttcctgttgcttatgatagaaatcttctgggtaattaataaaagaaatgcattttttacagttacggaggctgggaaatccaaggttgaagggccacaatggtacaagccttcttgctggcaaggactctgcagagtcccgagctggcacaggaaatcacatgatgagaaggctaagctcaggcttctcttcctcttcttataaagccaccagtccccactgacctgataacctattaatctataagtgaattaattcattcttgagagtggagccctcatgatccaatcaccttttaaagaccccacctctcagtactgccacattggggattaagtttcaccatgagttttggaggggacatgcaaaccatagcacatagcttttactataaaccaagtgtgtgttttaaagcacttaaaatgtttattttttaataacttttttctagactcttacttataggattcaattggactgcaaacattttaaaatttataatttaaatgtaaatttcagcttcaccctgtctgaataatcacagattgcatataagaagattcaaattaatgaggttttcttttctaagaactactaagctaatataagaaaaatgtatacatagtataaattaaaagaacatacgggtttggtttttttttttttttgagacggagtctcactctgttgcccaggctgcagtgcagtggtgtgaactcggctcactgcaacctctgcctgctgggttcaagcaattctcctgcctcagcctcccaagtagctggggctacaggcatgtgccaccatgcccggctagttttttgtatttttagtagagacggggtttttaacttgatatactgaagaacagtggtattcagaattataatgagcatttccaatgaaccataaatacatggaatttaatttattcttttaatatcttttttcttatttatgcctggggaatgcgtctttaacacatacccacagtaactttgattcttatagaaaagttttatagctactatgaaagtagagatatagaaatgtaataattgttgcagaaactcttctattgaaggagatggtggtgaggatagctatcctatgtttgtaagaacctagatcttcaatctttgaattgaaaaaaatcaggcttaagtttttaataataaattcacactcaatttatttttgaatggaataatttaattacagaataagaagatgaaggtcactgttgtccaaagtgttctgatactctacaatgtggtcacaaaatttgggaaatactacattgtgtatacctctttgtgagattcacaagaacctgtagcgtaataaagcctctgagaagacttgcagcaagaaacctctttaagctttgtttggtatatcattttccacacttactttatcataagcctattttgtggaatacctacaaaaatcccaagttttagaaatgctctgcttctggattattctaactacattctagacaagtattgagttccttagaaacctggactaggagaagcttttatttccctttagtttttcactgtgtgttttgcannnnnnnnnnnnnnnnnnnntttctgcaagagcttcattaatttcagttacttctcctgataaaggagaatagagttcactagcagctttcacactttccaaagcaccaaactcatcttgtttgttcaattttgtcccaacttcagggagactacaataaacaacatctcccaacgcttcctgtgcaaaattgctgattcccactgttccaatgccattttctgttgttacccattcgtgtttctctgtgaatttacgcaccgagagcagagcgggtccagtgcgtagcgtacggacggcgcccacccccagctgccagggcctcggcgggcagggcgcggcgggtgacgggaccgcgcgcagggtgcagagcagggcccgcacgctccgcaccactcgcagcgccatgttcgcaggggtgcgggggtcgcagcgctacgcctcggccacccgcgccgggaggcggggcggggaggggcccaggcttaagtttttaataataaattcacactcaatttatttttgaatggaataatttaattacagaataagaagatgaaggtcactgttgtccaaagtgttctgatactctacaatgtggtcacaaaatttgggaaatactacattgtgtatacctctttgtgagattcacaagaacctgtagcgtaataaagcctctgagaagacttgcagcaagaaacctctttaagctttgtttggtatatcattttccacacttactttatcataagcctattttgtggaatacctacaaaaatcccaagttttagaaatgctctgcttctggattattctaactacattctagacaagtattgagttccttagaaacctggactaggagaagcttttatttccctttagtttttcactgtgtgttttgcacagtaaagaatttctttctacagatttattcaaaattcgccagctataattctagtcatgttcttgtattctatccatggtacagtatcctttatataataaccttgtttggtaactgaattacttaagtcatttcattcctggtcctctcctaatctttgattatgctgttttttccaccctaaaaagtctttgttctcttgtaaggtattttaataatacctataatatcagttaatttgtgccattctacctatgtgtaatggtgttttatgaaagggtttaccatcttgaaaatggtatgcaaattaattcatattttttagtgctatttaatgaatttctgcttatattttagcctagttttttactaaatgtgactagtacttttaaaacgggtttatagactgtttctgcttcatgtaacttcatactttaaccttggagttatctccaagattccagattttctggaatatgcaatagtaaaatacaaagtcaggagtctaggttttattttcttaggttagttgtacatccttcagatttactcttttcctccattaaatgtttcttccaaatagaataataattgatactttgagctgtttcattattgctttgaaattgctggataatcaattttttacctattattttgttacttcaataaacctattatgtgctagatactctggtgggtgctggtgataatgataacacaacgcctaccctccttgagctctcagttcagtgggatacacagacacatatacatagttacaatacagtaattgcattgacagggctttgcagggctttgagagtattaaggacccctaatctaacctgaggaaggggagaattgtatttttataattcttggtttgtgacacattatcattgttagttcatacttggctccttttctttctttctttagatacccatgagcccaccaaccaatccaagaactaaaaaactcgctgtaacttaaatctacctgttcaccctattttgtccatctgcctaccacgccagtggtaaccagtgtcctgaatgttatggttatcatgccttgctttaaaaaacaaaacataaacatataaacataaagttttacccacttttgaactttatataaaaatgatgtcatactgtatacaagactgggactcttttttttcctcagatattatcttactgtgattcatccatgttacatgtagctcttgcccaatcatttttactgctatctaataatccatatttgactaaaccacagtttatccattttcctgttaatggacatttaggttatttctagtttttggtattaacagtgctgctttgagcattctgaaatatttctcctgataacagtttttcttgcgtatataccaaggaatggaccatttacaaaataatttaaaattgttttccaaagtgggagtgtaaattaaatataatatctaacaatattttttaaaaatcgtgtttattcacatcactgattcttgttgtcacatatcttgatttttctaattgatttggtaaacaataatatggtcttgatgttcattgcccaatttacaaataagattatgcatctcatgtttttcagcctgatctcctgatctggttttttgtttgtttgtttgtttgttttgagatggagtcttgctgtcaccaggctggagtgcagtggcacgatctcagttcactggaacctctgcctcccaggttcaagtgattctcctgccttagcctcccaggtagctgggattacaggtgcatgccaccacacccggctaatttttgtatttgtagtagagatggggtttcaccatgttagtcaggctggtcttgaactcctaaacctcaagtgatccacctgcctcggcctcccaaagtgctggaattacaggcatgagccactgcacccggtcctgatctggttttctactgggttgttttaattgagttgtttttcttttccttattgatttataagagttcttaatgcatttttgatactaatccactatcgtgtattagtgtacaaatattttttctattttatgatttttttcactgtttttaggctgttttttgatgaaccatttttaattttcacattaaattttatcaatcttttatgcttgtcactttcttttatttacaaaattcttatctggaattttaaaatttatctgaatttccttttgaagttttacttttgacatttaagttactaatttatttggaactgatttttgtttatgatgtatatgtgtaacttttccctgccccatttagatagccagtttttcccctgtacatttatgaaatggtgaattttcccagtgatctgctatcccacctatgtcatattacaaagatttatataaaacagatttgtttctaggctcttttgtttcatcagacaatttgcctgtctctctgtcagtatcatacttttgtaattattatagctttttagtaaatcttaatggcggctaaggcaagacccttccttctctttattcatttttagaaggatcttggctattctttgtcctttggttgattttataatcaactttttcagttctacaaataagtcatcagaatatgcttatagttgtaataaatctgtaaaataaatttgggtgaaaattgtttatctttacaatacaaagttatgtctacatttatttaggcctttttttcttttttccttgagacagggtcttgctgtgtcgcctaggctggattgcagtggcatgatcatggctcactgcagttttgacctcctaggctcaggcgatcctcccacctcagcttcctgagtagctgggaccacagatgtgtgccaccactcctggcttatttttgtgatttttttgtggagatggggtctcactatgttgcccagcctggtttcaaactcctgagctcaagggatcctcctgtcttagcctcccaaactgctgggattataggtgtgaactgctgcactcagcctaggccttttacaaaatatctttcagtaacattttatttttctgtgagcaggttttgcatatattttttataacttaaagacactttttgttgctgttataaatgcattccttttaaaatttaggctaattgtcccctgctgatatttagaaatgcagttaacttgtatatgattatgtatccagctacattccttttctattatttgtattaattggcccgtagatattttgagttttggtttttgttgttgttttaagagttgttttgttacccaggctggaatacatggcatgatcttagctcactgcatcctgtaactactgggctcaagccatcctcccacctcggcctcccaaatagcagggactacaggtgtgtgtgtaccaccatgcccagctaatttttttcatctttttttagagatgggatcttactgtgttgcccaggctggtcttgaactcctgggctcaagcagccctcctgcctcagactcccaagtagctgggattactggggtgagccaccgtgcctggcctagagcatactttttaaatgaacatttatgctttgatacagttctcgtttattcataattattaccacctcatttactaatgcagccttaattttgtccatacatcttgttttaaatgatttgaagctgggcatggtgactcatgcctgtaatcccagcactttgggaagctgaggtgggtggatcacttgaggtcaggagtccaagaccagcctggtcaatatggtgaaaccccatctctactaaaaatacaaaaattagccagatgtggtggaggcctgtagtcccaggtacttgggaggctgaggcaggagaattgcttgaacctgggaggcagaggttgcagtgagctgagaccccgccactgcactccagcctaggtgataaaataaatgatttgagctgccatgtaaattcttgttgcataatttttttctcatttatagctcttatgtcctttggcttagcaacacagttatttcctctgctacctataactctactttcttagcaaaagagttttttctttattggtttcttgctaatcacatgtttgtaactgattcattattcctttttcttccattcagaaaaatgagagatccaagcatatgtctcttaagtatgtctctttcgagaatatttgacctctctatccttcccattctcacctcccagtcagaaatagagtgaactaaacatgtcagcttttctgggagtttctaactgtatctaacttaaaaatgtatgtggagattcctttttctttgatagcatagaaaaaagttttgaaaacactttttaagtaagtctatatagcttaaagtataccatttagtttatgaaaaagtaaacatctttttattatgaaagtagaagtatataattgttacataattattttaaaaattgttagtcacaatttaatgtccatctttccaaaccctttctatgcatatataattttattctatgaattattctttagcctgtgttttagattaagcagtataatggtgatatctttcatgtggtttatggatcattcataccctttttaatggctgcataagtatttcattgtatggatttgccataatttatttaacctattctttctatatgaacatttagattatttccaatctgtctcaattacagttgtgcagtgaaaaaaagtttatgtatttacatattttaagtttttctgtaatatacattttttaaaagttaaattgctgagtcaaagcttatattacttaatttctcttcaaaaatatattttactggaactttacactatgggtgggagtgtaaatttatacagccactttggaaaaccacaaatagatcttcagtttgagagtatctattaaagcagaacattatgcacatactgaggtctagcagctcctcttctaggtatatatccaacataaatatgtacacagttcaccaaacaacatacacaaatgtggatagtagcctaatattagtaatcaaaaatgtcgacaacccaatgtccaccaatagtagaatggataaataaatattaatatatttataccaagtaatactctgcagcaaaaaggatgaatgaactacagccaagtacaacatgggtgaatcttacaaacataattctgagctaaagaagctagacataaaaaaaatgtattattccacttaattaaagttcacaagcaggcaaaattaattcatgatatcagaagtcagaataatggtttcctttaaagggacagtaatgatggaaatggggtacttaggagacttcaggaattctggttatactgtttctaaattctggtgctgattatatgggcctgttttgtttgcaaaaattcattgagctttttaccttaggattttcaactttcccgtatatgtgttatatttagtaaaaagtttacaatatcttttttatgtgtaaaaaccgctttcaaactcctctcagtaatgcctgttttcctgaactcttaccattctgatatacataaaagtcttttccatctaataaacataaaaagatcagttttttgtttttatcctattattagtgagactgagcatcttttatatatttgttaactgttatgagatctgtttttcttactgatttgtaacctttttaaagattatggacgtctggtctgttatatgtcaaaatataatattttaaataaattcaaactgacaaaattattaagtaatatgtgttaggagagaagttttattttaatagttaaatcagtttttaagagtcctttgttcttcaatcccagttctgtcaccaaatcatttcttaagagagtaaaatctgcttcattagttctaaattcgtaatatggagtccataaagaagatgctatttgaaggcccttgttttattgcttatatattaatattcttttttttttttttttgagacagagtctcgctctgtcacccaggctggagtgcagtggcgcgatctcggctcactgcaagctccgcctcccgggttcatgccattctcctgcctcagcctcccgagtagctgggactataggcgcccgctgccaaacctggctgattttttgtatttttagtagagatggggtttcattattctttttacctaaagtagtctgtttttggaacatctttaaaccacattttaaataaaatatcaaaatagaagtctatccactgctattatatattacctttagtttcttttcatttctctttatgtgttttcttaatatggagaagaggggaaagaacattggataaaatttgttatatttgtagtaaaattgcacatgaattttgtctgtattatgtttttataaaatagccctttaaaaaccagtttgccgcatgctattgcctttacttttcatccagtaccaaatttctaagtgatctcttaactaaaatactttgttgtagtaactcaactagtctgacttctcactgttgtgtctgcgtttttatgcttttggttgggggtgccttattgagatagtgtgtttatgtatttcctagacttactatattttcataagtttctcattattctttgtgaatatttttatttatttttgtttttttaatatgtaattcatatagacgctctgctgttgcccgtattcaggagttcttcagacggagaaaagaaaggaaagaaatggaagaattggatactttgaacattagaaggccgctagtaaaaatggtttataaaggccatcgcaactccaggacaatggtaccaaatgttcatggcattttttggtgaaattgcagtttcatgctctgagtgtttttccataatgatttatcttcatatattgccaatgggatttcagtattacattattaaatcttcagttatctctttatccaacatggttcttttagccctataatatattgtgaaagatcattattttttacaagaaaactctactaaaaaaatgcagattaaaaaaatttttagtttatacaagtaatcattgcttttgttttttttttttttccccctctctttctcacatttgctgtctacctgaaaagtttctggtggatttttttttttttttttttagcttgtattagcattctttgttagttttggagagaaggatttggatctataaaatctaagttgattgcaaaaaattgtcaggccactttatacccatttttaagattgacaagtgaaaatttgttttagtgacttaccagatgaaataagaatagaccagaaagatctctaagatcttttgtagtttttacgatctacaagtttctacacccagtgtaatattaattacttaataagaaaagtttttgagatgactagtgtaactgttactctgatcccttcataactagaaagtgttgttctcctcatatacattgcatcatcagaaggtatctacagaatcagttttaatccatattactgccatattacccttgctgatgaatttgtagcttgctttctttaggatctaggttaaaaaataacatttgggttggggaagtaattagctctttctataaatgtcattgctagtaacaatttactcatttttaaaaggttactcattattaatagaagtaaccaatttatatttcttgcattttattgcctaaaagttagcatgaaaataattagaggaaggagtgagaaaagagaagataagtaaatttaacagtagctcagataacaataaaattgtctcccctcttttgtgagagcaccaaaaatggcaaagtagcagctgcagttaaaattttttaaaatccttgtttgaaatacaaagatttttgatgtttcattcatgtgcattcatttaaaaatgtcattataactattccagtatatcatatgcctttgattctgcttcataaaattaagtatgtttgtatctttctcaattgtgttagcttataatagctaatgatcttctttctattctttgggtctaaagcaaaatacaaaagacaatttcttttatctgtgaattatttcattgtcttataaagctaaattggtacaatttttggaaagttcagcaacatatatgtaaattgccattatactgcccaaaacccagaaatcctattctttcatttagcagttaataattaagcacctattgtatcccaagtaccatttcaggtgctgtaaatatagtattgaacaaagcaaagtccctcttcttaggggggattttctattacttactgccatcttacccttgctgatgaatgcctatcataatttaaagaagctagaagacagatttttgtcagtttttttttttatagataggggatctcactatattgcccaggctggtctcaaactcctcagctcaggcagtcctcctgccttggcctcccaaagtgctgggattacaggtgtgagccactgcgcccagcatcaatttttaattttactattttctaagccagttttttaaaaaatgtaagaattaaaacaaataaaaaaatgtaagagtagcataaatctttgttttaataactttgatttgaatttttaaataattttttttaacccttagataaaagaagccaatttctggggtgctaactttgtaatgagtggttctgactgtggccacattttcatctgggatcggcacactgctgagcatttgatgcttctggaagctgataatcatgtggtaaactgcctgcagccacatccgtttgacccaagtaagatatcttttctaggacgagggctagaaattatttgtatgactcatcagtcatacaaaattattcttttttaattgttaatattataagaataatccaaactatctgactaggcaccagtagagtcaattacagctgaacttgcacttcaaacacacctgtaatctgctttttgcacaaagtaaaagaaaataggttaaaaagtttattctcccaatatttcttctaagttttacaagctgtaagaggtttggtgtgactgaactttttattgtatatccaaatggaacatccagtcatttttagtcttcacatagctgaattaatttatcagaacaaaagagcattgctcgtcttctttttgaaattgcccacatatctcataaaagaacaatgaataagtgacttcaacaatgaatctgagtgacttcaacatggtattaaaattacgttctaggataacatttagcaaattgtcaaaataatattttcaattaacagttaaatatatagtgtacaattgctgttcaaggttagttttgctatatatacatatatgcataatataagcatatcctgaattgcatgtttctaggcttcatattaatatataaattttatttctagttttagcctcatctggcatagattatgacataaagatctggtcaccattagaagagtcaaggatttttaaccgaaaacttgctgatgaagtaagatttttattgtacttactatagaccatatttcaatttgttcctaaaatgcttccctaagaaaaattaaaagttattagttgctaacatgaaacaagttaatgcagttaaggaggtcaaattttaagaaaaagaaaaattaagataaaaggatgtctataatactagggaggtaaaatctaaatagtagcttactaattataatattcatcatcggtaacaccagattaggtgtatagtagtttaagaaaaacaggtttgagtattcatgttattacaataaagaatcacacacaaaaaaatctgtccttttaagaaaataattttattataactgtttctccaaaagcctagcaatttttccatttttagtacagctatttttccattttgagtttttcttaaaaaggaaatggaactttgtttttcaggattagtatatagcagaacaaatgagtgaagaatcttttcctttatcattatattttaagatttttttaagcctgttaaaacagtattttcagcctgagttctttggagctctggatttcttctgggatgggagagggaaggtggataataggaaggcattactctgggcctttcctccccaacttcaaccagggtttttatttgtgggttctcatatactatttcttatgaaaatgagaatccattgctaaaaatgttagtaagttggaaaaccactactctagactaacactgactgttcgtagcacaattcccatgtatactttcactcattgaataggcatttataaaacagttgatgtattgtatacataatgctgggtgtaaaaaagataaggccctaccctcagagtttagtgggaaagacaatgtaaacagctagaacatactgtagtggggtctgtgtcagtcagaggtatacacatagtgttttggaagcccacagagaggaacagctgtttgtaaatggggtagataggatggagaggtcttcacagaagaaataagaattggacagaagtctgagaatagttcaccaggcagacagggagcaaagcagcatttaagacagaaggatcagcatgtgccaaagcatgagagggtaaatgaaccatcagtgtgcctggaaccctagagtacatgcacaaaagtagcttaatcaaactaaacggttaggtgagggtaagattgtgaagggccctgtggggcaccctgatgagttgggaatttattatttcagtattggggaactgttgatcagagtagcatctttctcttcctctcatactctttctttcatcctttttttcctttgccatgttttttgcttttccacttttttcctttgctcatggttacatattgcatctctgggtgttcacgagtattcaagtaatcctattcttggtacttaaggctcagtttcttgttaacccttgcccaaaaatttattttccaagactactctgcctcagtcaaggtaacatcttttcaagggattcaagtggcccatggataataatttaactgtatttcgtcactaaagttatcagttctcctatagggaaaacaaggagccaacaaagtaaatggctctgagaagcaaattgcaagtaaaagctaaattaaattcttaaatgttttaagtagcctcaaaatttgacctttgtttttctgccatttgaaagagttgtgttctttgaccttcctcctttaaatacaagttacagtgattatttggcattgaatagacttaaggcagaaatatagacatcagacgcataaagaatgaagtaattcctcctggtactggctgattgtttacggtttgcctgatcttcaaggaaaaaatacagttactttatgatctttgatacgatttttaacttgccttgtaggttataactcgaaacgaactcatgctggaagaaactagaaacaccattacagttccagcctctttcatgttgaggatgttggcttcacttaatcatatccgagctggtaggaactttaagtatactactaaaaccatttttatatttgaaaatatattattatttaagatctgctttaaaggggtttatatatattttttaatatcacaaaatgagggtagcttaacttctaaactaggatttctgtgaatgcttgatcttggcacagtaacttagttcctcatgaactacatttgtcgtaaaatggtcaaaatgaaaagaccagagtcacgtaaaaactcttatcagctgctgttttcttagagtacataaccttaggatatattatcgtgcatattctttaatggtaggtttgttgaaaatcagtcatagcccaaacagaaataaatgtgacatgctaagaaatgaaacatacctcagtttgctttttgaatatttttttgttttagataaactgtgaggtgcagtgccacagatacataaaaatgcatatattacaactaatgttcaagaaggaattgaataatttataacaaaagaaaaggtctagtatctgttataagcagaatatatttatcaaacaaaagagttttaccactcttcactgatttcataaatgtccccatacgtttggtattagctatcatttaataataataggtaccatttataaagtaactataatgtatcaggcttatactaattatttcacagctttatcctcatttacctccaatcctttacaaagtaggttatttgtaataacttagcccaagtcacacaactgataaatattaaagccagaatttgaaattagcttccaagcccttactcccctttgacctataaatttcacttacaggaatatattcaaatcattcatatgacatgcaaacctctggatgatctaatctcaaactattctagctgatttacagcattcttttcttctgtgactactccatccacactggccctctttgatttttggggatacaccaaactctttcccacctcagggtttttataatcgtgctgtcccctcccatcttcactctgttgagataacttcttactgtaagaactgcataagcagtgaattaaatatcacttcctcagagagagtggggaatggagacaagtattccacagaaagtagacagcgtatagcgtttttctaagccctagaggagagaaagtatagcacatctgaaaaattgaaagaagacccatatgtttgtaattaaaagaattagaaaataatcctcaaatgtaaatattaacttttaccaggaaagagggaaaacttcaaatggtgaaaacaacaacaaaaaataaacctggaatgtaaacaaaaaatgttaatagaccaacaaaatgtttttgtgatcttctttgggttcctgtattattaaattataataacactgtaacttttttaaaatatattttgttcaataacagcaagtaacccttaaaattcatccatttgaatttcacatttgaggaagcagcattttaaaacaagaaaaacgtttactggtaatgacacctaaaatgtgcttactcttatctagtggatggctcttcctcagtagttttcctgcagaaaattaattctctttccagttgcacaaaaatctatttgtgctaatgtagcaatggttggttagttaatagccactaccatccttctttggttttagaattagataaggtgttttataatataaaaattctctttcatttctttttgccagcaatcaaaaagacaatttctagttggtttagtcagcttatcttcttgcttctcttatacaaaatactagatagaataaagtgcccaagagttaacatttctgctgcccttatctttaagatatctagttatttgatgggtcagttagtcaaccactctttttctctcctatccagtgtcctgcagtccaaatacaataatgtgtgcatattcaggagagttaaaaatggacttggatcaaataagcacatggtagccacaaagtacctctcggctcatccattactccagaaggcttcctaggaagtccagggaatagatacggacagtttctttctgttggagctgtgatttttaatgaaggagcctcttaaaatcatctgtaggggttttacaaactacaaatacttacctaggtctcacctgctaaagattctggttcattttagctggatagagattaagcgtctacatttttaaaaagcaaccaaagttaatctcatgaataatgcactaaagactgctagtctagtggccacttgagatggaaaggcatttctgacatccctagaagctttgagaggctttggaaagatggtaatggtttgcatggatcattctagactcctctagaatgtcttagaatcactttactgccctgcttaaaattctcctttgcccacacatgttcttagggtagagtccaaatgtgttaacatgtcttataaaaccctgcattatctcttgacattcttcccattatacctctggatcttagcacagatagttatcatttctctgtcatgggtttgcaaagcctgttatcctattgagatcacaatcacttattaaatcgttcacagattgactccctcagtaagtgatactaactttactccagaatagacctaatatttatatacccttgatctccctgcttctacttctcttgtcctcatagtctgattttcacacagcagccagagggatcctttcaaaacaggtcagttaatttttttgttaatggccagatatggtttttattgtaaccactcaactctgccattgtaatgcaaaaacagccatagaccatatgtaaatgaacaggtatggcacttataataaaacttaatatataaaaacagagccaggtacagtggctcacgcctgtaatctcagcactttgggaggctgaggcaggtgaatcacctgaggtcaggaattcaagaccagcctcgccaacatggcaaaaccccgtctctataaaaataaaaaataaaaaaaattataaatacaaaaatacaaaaattagctggacgtgatggtgcacacctgtaatcccagctacttgggaggctgaggcaggagagtcactttaacttgggaggtagaggttgcagtgagccaaaattgcgccactacactccagcctgggtgacagattgagactctgtctcaaacaaaaccaaaatcaggcagtgggctgtatttgcctatgggctatagtctgctaccacctttttaaaacacaaattagataccaccccctcttaaaattctcagggactccctattgctcttaaagtaaaacccagacttcttactctggccttcaaggtcctacatgacatacattctgccaacctctgacttccactcagtccacctttttttctagctcactacattttagccatactggcctctcttcctcaaactcatcaagcttagtagcacatttaggaccttttcacttgttcatctgcccaactttgcccccaggacttcacatacaattgaggtcttagctccaatatcacctccttagaaaagtcttccctggtagtgcggtggctcatgcctgtaatcccagcactttgggaggccgaggcgggtagatcacgaggtcaggagattgagaccagcctggccaacatggtgaaatcccatctgtactgaaaaatacaaaaattagctgggtgtggtggcgcgtgcctgtagtcccagctacttgggaggctgaggcaggagaatcgcctgaacccaggaggtggaggttgtagtgagccgagatcgcaccactgcactccagcctggtgacagagggagaatcagtctaaaaaaaaaaaaaaaaaaaaaaaaaaaagaaaagaaaagtcttccctggtcactcaatctaaagttgttttctgtgtcttctcatatcttccctctcacttagtcattcttgttcattgccttattttcctcaagtacttatcactcttaagctttaatttctttatttattgtcttattacagattagaggagaaaaatacaggtggtaccttgtttgttgtctatcttcctccttagaaagtaagcttataaagagcagagacccagtttgtcttaatttgcagctgggtctttaggctcctaaaacagtgcctaccacatagtagttgcttaacaaatactgagtattctggtaaataagtacacatctagtatcaaatctctagctaacaatgaatttgtattatttcttttaaagaaagtaaataaattctttgtaaagggtagcctggaaaataaaacaacagtgttttttgtgaaacacaggcttccattgggaaatttttttcttatctaccttccctccctctgcagcaaactcagtgtctcttcatatcattatcttccccagtttcctgaagaaatattctaacagaataaaaggaacctttctacaaatgtaaaccttatttacaaaagcaatttgacattgctacttctgaaaaacagtatacatagacatcctggctaacatggtgaaaccccatctctactaaaaacaaaaaaatcagccgggtgtggtggcacgctcctgtagtcccagctactcgggagggcgagacaggagaatcgcttgaacccgggaggcggaggttgcagtgagccaagatcgcgccactgcactccagcctgggcgatagagcgagactcggtctcaaaaaaaaaagaagaaaaagaaaaacagtatacatagaagtgattcttatttccagtttttatttaagagaacacactgttcttcagacctccttgtctataattgccaaccagagatttgtataagtgttaactgctttgcagccttactacttcagtagcatttcatgaacagaagatttaattaattctgagaagttgggcttacattctggaagaggtgactatgcatcagttaaatgaattgaatttgaggagagaacaactattctgctttcctcatttcagaagccactgtcacttattctgtgacctatcgtaagactcttggccctcatttgtctctttattgtgtgcctctgagtgtaaaagtctaacctctactgcaaactccctgatttaaaggctgtgacatttttttcttaactctctattatcccatcttctttataatgtgacaaccaaaagaaatttgagtaagaagcctgccaactttgagataggccgttactgcttcatcatgctctaacatgacaggataggtttcttgaatatattcagtcatactcaggattcccattcctgagccctacttaagtagaatagcaacttcatgttttgttctctcttgaaagtatcacacaataaaaacaatgtaattttttttatactaatatcccttaggtagccttttattggtcagaaattcttctactgtgtttaaattccttactgatctataaaggtctattcaaatcttattttgttcatttattttataaatatgtattgaatacatatttataaaataaatgaacaaaataagatttgaatagacctttatagatcagtaaggaattgaatacttatttgtattcaatacctatttgtataattaaggttataaaggttacacatacattatgtcattggtttgacattggattagagttggcatagaggagatttaatctaattcacttggacaattaaacaattaaaagggacatatagtcccttcagtgtactgttcttggtgctgttgacctaggatccagtgggagcatttaatcctgtgtagataataaataaaatctcaggattcagtcttctcttgctgttgacagtgggactgaactgttttccttatgcttaaccttaatattttccatgttactatgtggaaatgtttctggggcagaaacatcctagttccatctcagtgatggtagtgattttatgctgttgccttcttcacaatacccttatgtaatgtatcttaccttcataaaacttatattcatttattcagtaaaccttcattgaacatcctatactaggctctgaggatataaagataaaaagaagtaactcctgccctccaggaactctcaatctggtctgcaggaagacatgcaaacgactattactgtaattaggatcatcattatgaagttcatataagatattctagaatgtggaggagggagttcataattctgcagatagcctgtttggaaatgtccaggaaaagtttcaccaagggtataatagttgtattgagatgagtaaacctttatagctaaagaattgggcaaaagtatcccaagcagaggaatagcaagtgtaattcctgaaaacttgaacgagcatactgtactcaccagtttgtaagtttatattcacttgagtatttaacctaaataagctccttgagaccagaaatttacatctgttttggtcaccattgtattctcaggttttatcacaatgcctggaacatagtatttaatttaaaaaaatctttttacaaacagaattacacaaatcctcaacaatcgtccacatattttctctcacacagctgcctcctcactcccctttgcagcacctgatgtacctccttagaaacctagactccaaagaacactgtttgacaaccactgcagtagaacataatatatcaagattttaggagtgggtttcttttttcatttttacatgttttagaataacatgcataatcaaagctaataatactgtgttttctttactcttttatttgcctctaaagacatccacacatagtggtgaactgatttttaatgcgttttaaataaaaggcattgaaaaatattaataattgtaattactaaaagtatttctctttgcgattctcttatctgtgtttccagaccggttggagggtgacagatcagaaggctctggtcaagagaatgaaaatgaggatgaggaataataaactctttttggcaagcacttaaatgttctgaaatttgtataagacatttattatatttttttctttacagagctttagtgcaattttaaggttatggtttttggagtttttccctttttttgggataacctaacattggtttggaatgattgtgtgcatgaatttgggagattgtataaaacaaaactagcagaatgtttttaaaactttttgccgtgtatgaggagtgctagaaaatgcaaagtgcaatattttccctaaccttcaaatgtgggagcttggatcaatgttgaagaataattttcatcatagtgaaaatgttggttcaaataaatttctacacttgccatttgcatgtttgttgctttctaattaaagaaactggttgttttaagat

SEQ ID NO: 277 - DNA, 2791 bp, Homo Sapiens
gttttgacaacaattcgttcagggcaccgagcaaacatatttagtgcaaagttcttaccttgtacaaatgataaacagattgtatcctgctctggagatggagtaatattttataccaacgttgagcaagatgcagaaaccaacagacaatgccaatttacgtgtcattatggaactacttatgagattatgactgtacccaatgacccttacacttttctctcttgtggtgaagatggaactgttaggtggtttgatacacgcatcaaaactagctgcacaaaagaagattgtaaagatgatattttaattaactgtcgacgtgctgccacgtctgttgctatttgcccaccaataccatattaccttgctgttggttgttctgacagctcagtacgaatatatgatcggcgaatgctgggcacaagagctacagggaattatgcaggtcgagggactactggaatggttgcccgttttattccttcccatcttaataataagtcctgcagagtgacatctctgtgttacagtgaagatggtcaagagattctcgttagttactcttcagattacatatatctttttgacccgaaagatgatacagcacgagaacttaaaactccttctgcggaagagagaagagaagagttgcgacaaccaccagttaagcgtttgagacttcgtggtgattggtcagatactggacccagagcaaggccggagagtgaacgagaacgagatggagagcagagtcccaatgtgtcattgatgcagagaatgtctgatatgttatcaagatggtttgaagaagcaagtgaggttgcacaaagcaatagaggacgaggaagatctcgacccagaggtggaacaagtcaatcagatatttcaactcttcctacggtcccatcaagtcctgatttggaagtgagtgaaactgcaatggaagtagatactccagctgaacaatttcttcagccttctacatcctctacaatgtcagctcaggctcattcgacatcatctcccacagaaagccctcattctactcctttgctatcttctccagacagtgaacaaaggcagtctgttgaggcatctggacaccacacacatcatcagtctgattctccttcttctgtggttaacaaacagctcggatccatgtcacttgacgagcaacaggataacaataatgaaaagctgagccccaaaccagggacaggtgaaccagttttaagtttgcactacagcacagaaggaacaactacaagcacaataaaactgaactttacagatgaatggagcagtatagcatcaagttctagaggaattgggagccattgcaaatctgagggtcaggaggaatctttcgtcccacagagctcagtgcaaccaccagaaggagacagtgaaacaaaagctcctgaagaatcatcagaggatgtgacaaaatatcaggaaggagtatctgcagaaaacccagttgagaaccatatcaatataacacaatcagataagttcacagccaagccattggattccaactcaggagaaagaaatgacctcaatcttgatcgctcttgtggggttccagaagaatctgcttcatctgaaaaagccaaggaaccagaaacttcagatcagactagcactgagagtgctaccaatgaaaataacaccaatcctgagcctcagttccaaacagaagccactgggccttcagctcatgaagaaacatccaccagggactctgctcttcaggacacagatgacagtgatgatgacccagtcctgatcccaggtgcaaggtatcgagcaggacctggtgatagacgctctgctgttgcccgtattcaggagttcttcagacggagaaaagaaaggaaagaaatggaagaattggatactttgaacattagaaggccgctagtaaaaatggtttataaaggccatcgcaactccaggacaatgataaaagaagccaatttctggggtgctaactttgtaatgagtggttctgactgtggccacattttcatctgggatcggcacactgctgagcatttgatgcttctggaagctgataatcatgtggtaaactgcctgcagccacatccgtttgacccaattttagcctcatctggcatagattatgacataaagatctggtcaccattagaagagtcaaggatttttaaccgaaaacttgctgatgaagttataactcgaaacgaactcatgctggaagaaactagaaacaccattacagttccagcctctttcatgttgaggatgttggcttcacttaatcatatccgagctgaccggttggagggtgacagatcagaaggctctggtcaagagaatgaaaatgaggatgaggaataataaactctttttggcaagcacttaaatgttctgaaatttgtataagacatttattatatttttttctttacagagctttagtgcaattttaaggttatggtttttggagtttttccctttttttgggataacctaacattggtttggaatgattgtgtgcatgaatttgggagattgtataaaacaaaactagcagaatgtttttaaaactttttgccgtgtatgaggagtgctagaaaatgcaaagtgcaatattttccctaaccttcaaatgtgggagcttggatcaatgttgaagaataattttcatcatagtgaaaatgttggttcaaataaatttctacacttgccatttgcatgtttgttgctttctaattaaagaaactggttgttttaagat

SEQ ID NO: 278 - protein, 733 aa, Homo Sapiens
MTVPNDPYTFLSCGEDGTVRWFDTRIKTSCTKEDCKDDILINCRRAATSVAICPPIPYYLAVGCSDSSVRIYDRRMLGTRATGNYAGRGTTGMVARFIPSHLNNKSCRVTSLCYSEDGQEILVSYSSDYIYLFDPKDDTARELKTPSAEERREELRQPPVKRLRLRGDWSDTGPRARPESERERDGEQSPNVSLMQRMSDMLSRWFEEASEVAQSNRGRGRSRPRGGTSQSDISTLPTVPSSPDLEVSETAMEVDTPAEQFLQPSTSSTMSAQAHSTSSPTESPHSTPLLSSPDSEQRQSVEASGHHTHHQSDSPSSVVNKQLGSMSLDEQQDNNNEKLSPKPGTGEPVLSLHYSTEGTTTSTIKLNFTDEWSSIASSSRGIGSHCKSEGQEESFVPQSSVQPPEGDSETKAPEESSEDVTKYQEGVSAENPVENHINITQSDKFTAKPLDSNSGERNDLNLDRSCGVPEESASSEKAKEPETSDQTSTESATNENNTNPEPQFQTEATGPSAHEETSTRDSALQDTDDSDDDPVLIPGARYRAGPGDRRSAVARIQEFFRRRKERKEMEELDTLNIRRPLVKMVYKGHRNSRTMIKEANFWGANFVMSGSDCGHIFIWDRHTAEHLMLLEADNHVVNCLQPHPFDPILASSGIDYDIKIWSPLEESRIFNRKLADEVITRNELMLEETRNTITVPASFMLRMLASLNHIRADRLEGDRSEGSGQENENEDEE

SEQ ID NO: 279 - DNA, 3444 bp, Homo Sapiens
gtgaccaccggtgctcacagcccctgtcacgtaccccctggcttactcaatcgatcacgaccctctcatgcggacccccttagagttgtgagcccttaaaagggacagaagttgagcatcagacgagctcggattttgagacgctagcctgccgattctcccagctgattaaagccactcccttcactatctcggtgtctgaggggttttgtctgcggctcatcctgctacatttcttggttccctgaccgggaagcaaggtgattaacagatggtcgaggcagctccttaggcggctttagcctgccctgtggaacatccctgctggggactccaaccagccagagtgacgcggatcctgagagctctcctgggtaggcatttgccccggtgggacacctcgccagagcagtgtgtggcaggcccccgtggaggatcaacagagtggctgaacaccgggaaggaattggcacttggagtccggacaactaaaacttggaagaagagaatttatccaaagattaaaacttgaagcaacccttaatgtgcatgatggttgtgttaatacaatctgttggaatgacactggagaatatattttatctggctcagatgacaccaaattagtaattagtaatccttacagcagaaaggttttgacaacaattcgttcagggcaccgagcaaacatatttagtgcaaagttcttaccttgtacaaatgataaacagattgtatcctgctctggagatggagtaatattttataccaacgttgagcaagatgcagaaaccaacagacaatgccaatttacgtgtcattatggaactacttatgagattatgactgtacccaatgacccttacacttttctctcttgtggtgaagatggaactgttaggtggtttgatacacgcatcaaaactagctgcacaaaagaagattgtaaagatgatattttaattaactgtcgacgtgctgccacgtctgttgctatttgcccaccaataccatattaccttgctgttggttgttctgacagctcagtacgaatatatgatcggcgaatgctgggcacaagagctacagggaattatgcaggtcgagggactactggaatggttgcccgttttattccttcccatcttaataataagtcctgcagagtgacatctctgtgttacagtgaagatggtcaagagattctcgttagttactcttcagattacatatatctttttgacccgaaagatgatacagcacgagaacttaaaactccttctgcggaagagagaagagaagagttgcgacaaccaccagttaagcgtttgagacttcgtggtgattggtcagatactggacccagagcaaggccggagagtgaacgagaacgagatggagagcagagtcccaatgtgtcattgatgcagagaatgtctgatatgttatcaagatggtttgaagaagcaagtgaggttgcacaaagcaatagaggacgaggaagatctcgacccagaggtggaacaagtcaatcagatatttcaactcttcctacggtcccatcaagtcctgatttggaagtgagtgaaactgcaatggaagtagatactccagctgaacaatttcttcagccttctacatcctctacaatgtcagctcaggctcattcgacatcatctcccacagaaagccctcattctactcctttgctatcttctccagacagtgaacaaaggcagtctgttgaggcatctggacaccacacacatcatcagtctgattctccttcttctgtggttaacaaacagctcggatccatgtcacttgacgagcaacaggataacaataatgaaaagctgagccccaaaccagggacaggtgaaccagttttaagtttgcactacagcacagaaggaacaactacaagcacaataaaactgaactttacagatgaatggagcagtatagcatcaagttctagaggaattgggagccattgcaaatctgagggtcaggaggaatctttcgtcccacagagctcagtgcaaccaccagaaggagacagtgaaacaaaagctcctgaagaatcatcagaggatgtgacaaaatatcaggaaggagtatctgcagaaaacccagttgagaaccatatcaatataacacaatcagataagttcacagccaagccattggattccaactcaggagaaagaaatgacctcaatcttgatcgctcttgtggggttccagaagaatctgcttcatctgaaaaagccaaggaaccagaaacttcagatcagactagcactgagagtgctaccaatgaaaataacaccaatcctgagcctcagttccaaacagaagccactgggccttcagctcatgaagaaacatccaccagggactctgctcttcaggacacagatgacagtgatgatgacccagtcctgatcccaggtgcaaggtatcgagcaggacctggtgatagacgctctgctgttgcccgtattcaggagttcttcagacggagaaaagaaaggaaagaaatggaagaattggatactttgaacattagaaggccgctagtaaaaatggtttataaaggccatcgcaactccaggacaatgataaaagaagccaatttctggggtgctaactttgtaatgagtggttctgactgtggccacattttcatctgggatcggcacactgctgagcatttgatgcttctggaagctgataatcatgtggtaaactgcctgcagccacatccgtttgacccaattttagcctcatctggcatagattatgacataaagatctggtcaccattagaagagtcaaggatttttaaccgaaaacttgctgatgaagttataactcgaaacgaactcatgctggaagaaactagaaacaccattacagttccagcctctttcatgttgaggatgttggcttcacttaatcatatccgagctgaccggttggagggtgacagatcagaaggctctggtcaagagaatgaaaatgaggatgaggaataataaactctttttggcaagcacttaaatgttctgaaatttgtataagacatttattatatttttttctttacagagctttagtgcaattttaaggttatggtttttggagtttttccctttttttgggataacctaacattggtttggaatgattgtgtgcatgaatttgggagattgtataaaacaaaactagcagaatgtttttaaaactttttgccgtgtatgaggagtgctagaaaatgcaaagtgcaatattttccctaaccttcaaatgtgggagcttggatcaatgttgaagaataattttcatcatagtgaaaatgttggttcaaataaatttctacacttgccatttgcatgtttgttgctttctaattaaagaaactggttgttttaagat

SEQ ID NO: 280 - protein, 733 aa, Homo Sapiens; identical to SEQ ID NO: 278

SEQ ID NO: 281 - DNA, 3311 bp, Homo Sapiens
agggtatccaggacgaggagagggaggagtcgccatcgcctccgcctccgcctcctcctgttggaggggggctgagggaggagactgttgctgatctttggatgttctggttagtctaagaaggagagtatgaggcgagctccggcccgggtgcggccgggcttcaggggcccaggcgccgctgctgccaccgccatctaacgctgcgccctggaggcccggcgcgcggatggtgccggtgcggctcgggtgttgaaacgggtgtcccctccccctcctcccctcccccacgcggtggtctcccctcccacccggctcaggcagagccatgtctcggggtggctcctacccacacctgttgtgggacgtgaggaaaaggtccctcgggctggaggacccgtcccggctgcggagtcgctacctgggaagaagagaatttatccaaagattaaaacttgaagcaacccttaatgtgcatgatggttgtgttaatacaatctgttggaatgacactggagaatatattttatctggctcagatgacaccaaattagtaattagtaatccttacagcagaaaggttttgacaacaattcgttcagggcaccgagcaaacatatttagtgcaaagttcttaccttgtacaaatgataaacagattgtatcctgctctggagatggagtaatattttataccaacgttgagcaagatgcagaaaccaacagacaatgccaatttacgtgtcattatggaactacttatgagattatgactgtacccaatgacccttacacttttctctcttgtggtgaagatggaactgttaggtggtttgatacacgcatcaaaactagctgcacaaaagaagattgtaaagatgatattttaattaactgtcgacgtgctgccacgtctgttgctatttgcccaccaataccatattaccttgctgttggttgttctgacagctcagtacgaatatatgatcggcgaatgctgggcacaagagctacagggaattatgcaggtcgagggactactggaatggttgcccgttttattccttcccatcttaataataagtcctgcagagtgacatctctgtgttacagtgaagatggtcaagagattctcgttagttactcttcagattacatatatctttttgacccgaaagatgatacagcacgagaacttaaaactccttctgcggaagagagaagagaagagttgcgacaaccaccagttaagcgtttgagacttcgtggtgattggtcagatactggacccagagcaaggccggagagtgaacgagaacgagatggagagcagagtcccaatgtgtcattgatgcagagaatgtctgatatgttatcaagatggtttgaagaagcaagtgaggttgcacaaagcaatagaggacgaggaagatctcgacccagaggtggaacaagtcaatcagatatttcaactcttcctacggtcccatcaagtcctgatttggaagtgagtgaaactgcaatggaagtagatactccagctgaacaatttcttcagccttctacatcctctacaatgtcagctcaggctcattcgacatcatctcccacagaaagccctcattctactcctttgctatcttctccagacagtgaacaaaggcagtctgttgaggcatctggacaccacacacatcatcagtctgataacaataatgaaaagctgagccccaaaccagggacaggtgaaccagttttaagtttgcactacagcacagaaggaacaactacaagcacaataaaactgaactttacagatgaatggagcagtatagcatcaagttctagaggaattgggagccattgcaaatctgagggtcaggaggaatctttcgtcccacagagctcagtgcaaccaccagaaggagacagtgaaacaaaagctcctgaagaatcatcagaggatgtgacaaaatatcaggaaggagtatctgcagaaaacccagttgagaaccatatcaatataacacaatcagataagttcacagccaagccattggattccaactcaggagaaagaaatgacctcaatcttgatcgctcttgtggggttccagaagaatctgcttcatctgaaaaagccaaggaaccagaaacttcagatcagactagcactgagagtgctaccaatgaaaataacaccaatcctgagcctcagttccaaacagaagccactgggccttcagctcatgaagaaacatccaccagggactctgctcttcaggacacagatgacagtgatgatgacccagtcctgatcccaggtgcaaggtatcgagcaggacctggtgatagacgctctgctgttgcccgtattcaggagttcttcagacggagaaaagaaaggaaagaaatggaagaattggatactttgaacattagaaggccgctagtaaaaatggtttataaaggccatcgcaactccaggacaatgataaaagaagccaatttctggggtgctaactttgtaatgagtggttctgactgtggccacattttcatctgggatcggcacactgctgagcatttgatgcttctggaagctgataatcatgtggtaaactgcctgcagccacatccgtttgacccaattttagcctcatctggcatagattatgacataaagatctggtcaccattagaagagtcaaggatttttaaccgaaaacttgctgatgaagttataactcgaaacgaactcatgctggaagaaactagaaacaccattacagttccagcctctttcatgttgaggatgttggcttcacttaatcatatccgagctgaccggttggagggtgacagatcagaaggctctggtcaagagaatgaaaatgaggatgaggaataataaactctttttggcaagcacttaaatgttctgaaatttgtataagacatttattatatttttttctttacagagctttagtgcaattttaaggttatggtttttggagtttttccctttttttgggataacctaacattggtttggaatgattgtgtgcatgaatttgggagattgtataaaacaaaactagcagaatgtttttaaaactttttgccgtgtatgaggagtgctagaaaatgcaaagtgcaatattttccctaaccttcaaatgtgggagcttggatcaatgttgaagaataattttcatcatagtgaaaatgttggttcaaataaatttctacacttgccatttgcatgtttgttgctttctaattaaagaaactggttgttttaagat

SEQ ID NO: 282 - protein, 860 aa, Homo Sapiens
MSRGGSYPHLLWDVRKRSLGLEDPSRLRSRYLGRREFIQRLKLEATLNVHDGCVNTICWNDTGEYILSGSDDTKLVISNPYSRKVLTTIRSGHRANIFSAKFLPCTNDKQIVSCSGDGVIFYTNVEQDAETNRQCQFTCHYGTTYEIMTVPNDPYTFLSCGEDGTVRWFDTRIKTSCTKEDCKDDILINCRRAATSVAICPPIPYYLAVGCSDSSVRIYDRRMLGTRATGNYAGRGTTGMVARFIPSHLNNKSCRVTSLCYSEDGQEILVSYSSDYIYLFDPKDDTARELKTPSAEERREELRQPPVKRLRLRGDWSDTGPRARPESERERDGEQSPNVSLMQRMSDMLSRWFEEASEVAQSNRGRGRSRPRGGTSQSDISTLPTVPSSPDLEVSETAMEVDTPAEQFLQPSTSSTMSAQAHSTSSPTESPHSTPLLSSPDSEQRQSVEASGHHTHHQSDNNNEKLSPKPGTGEPVLSLHYSTEGTTTSTIKLNFTDEWSSIASSSRGIGSHCKSEGQEESFVPQSSVQPPEGDSETKAPEESSEDVTKYQEGVSAENPVENHINITQSDKFTAKPLDSNSGERNDLNLDRSCGVPEESASSEKAKEPETSDQTSTESATNENNTNPEPQFQTEATGPSAHEETSTRDSALQDTDDSDDDPVLIPGARYRAGPGDRRSAVARIQEFFRRRKERKEMEELDTLNIRRPLVKMVYKGHRNSRTMIKEANFWGANFVMSGSDCGHIFIWDRHTAEHLMLLEADNHVVNCLQPHPFDPILASSGIDYDIKIWSPLEESRIFNRKLADEVITRNELMLEETRNTITVPASFMLRMLASLNHIRADRLEGDRSEGSGQENENEDEE

SEQ ID NO: 283 - DNA, 3371 bp, Homo Sapiens
agggtatccaggacgaggagagggaggagtcgccatcgcctccgcctccgcctcctcctgttggaggggggctgagggaggagactgttgctgatctttggatgttctggttagtctaagaaggagagtatgaggcgagctccggcccgggtgcggccgggcttcaggggcccaggcgccgctgctgccaccgccatctaacgctgcgccctggaggcccggcgcgcggatggtgccggtgcggctcgggtgttgaaacgggtgtcccctccccctcctcccctcccccacgcggtggtctcccctcccacccggctcaggcagagccatgtctcggggtggctcctacccacacctgttgtgggacgtgaggaaaaggtccctcgggctggaggacccgtcccggctgcggagtcgctacctgggaagaagagaatttatccaaagattaaaacttgaagcaacccttaatgtgcatgatggttgtgttaatacaatctgttggaatgacactggagaatatattttatctggctcagatgacaccaaattagtaattagtaatccttacagcagaaaggttttgacaacaattcgttcagggcaccgagcaaacatatttagtgcaaagttcttaccttgtacaaatgataaacagattgtatcctgctctggagatggagtaatattttataccaacgttgagcaagatgcagaaaccaacagacaatgccaatttacgtgtcattatggaactacttatgagattatgactgtacccaatgacccttacacttttctctcttgtggtgaagatggaactgttaggtggtttgatacacgcatcaaaactagctgcacaaaagaagattgtaaagatgatattttaattaactgtcgacgtgctgccacgtctgttgctatttgcccaccaataccatattaccttgctgttggttgttctgacagctcagtacgaatatatgatcggcgaatgctgggcacaagagctacagggaattatgcaggtcgagggactactggaatggttgcccgttttattccttcccatcttaataataagtcctgcagagtgacatctctgtgttacagtgaagatggtcaagagattctcgttagttactcttcagattacatatatctttttgacccgaaagatgatacagcacgagaacttaaaactccttctgcggaagagagaagagaagagttgcgacaaccaccagttaagcgtttgagacttcgtggtgattggtcagatactggacccagagcaaggccggagagtgaacgagaacgagatggagagcagagtcccaatgtgtcattgatgcagagaatgtctgatatgttatcaagatggtttgaagaagcaagtgaggttgcacaaagcaatagaggacgaggaagatctcgacccagaggtggaacaagtcaatcagatatttcaactcttcctacggtcccatcaagtcctgatttggaagtgagtgaaactgcaatggaagtagatactccagctgaacaatttcttcagccttctacatcctctacaatgtcagctcaggctcattcgacatcatctcccacagaaagccctcattctactcctttgctatcttctccagacagtgaacaaaggcagtctgttgaggcatctggacaccacacacatcatcagtctgattctccttcttctgtggttaacaaacagctcggatccatgtcacttgacgagcaacaggataacaataatgaaaagctgagccccaaaccagggacaggtgaaccagttttaagtttgcactacagcacagaaggaacaactacaagcacaataaaactgaactttacagatgaatggagcagtatagcatcaagttctagaggaattgggagccattgcaaatctgagggtcaggaggaatctttcgtcccacagagctcagtgcaaccaccagaaggagacagtgaaacaaaagctcctgaagaatcatcagaggatgtgacaaaatatcaggaaggagtatctgcagaaaacccagttgagaaccatatcaatataacacaatcagataagttcacagccaagccattggattccaactcaggagaaagaaatgacctcaatcttgatcgctcttgtggggttccagaagaatctgcttcatctgaaaaagccaaggaaccagaaacttcagatcagactagcactgagagtgctaccaatgaaaataacaccaatcctgagcctcagttccaaacagaagccactgggccttcagctcatgaagaaacatccaccagggactctgctcttcaggacacagatgacagtgatgatgacccagtcctgatcccaggtgcaaggtatcgagcaggacctggtgatagacgctctgctgttgcccgtattcaggagttcttcagacggagaaaagaaaggaaagaaatggaagaattggatactttgaacattagaaggccgctagtaaaaatggtttataaaggccatcgcaactccaggacaatgataaaagaagccaatttctggggtgctaactttgtaatgagtggttctgactgtggccacattttcatctgggatcggcacactgctgagcatttgatgcttctggaagctgataatcatgtggtaaactgcctgcagccacatccgtttgacccaattttagcctcatctggcatagattatgacataaagatctggtcaccattagaagagtcaaggatttttaaccgaaaacttgctgatgaagttataactcgaaacgaactcatgctggaagaaactagaaacaccattacagttccagcctctttcatgttgaggatgttggcttcacttaatcatatccgagctgaccggttggagggtgacagatcagaaggctctggtcaagagaatgaaaatgaggatgaggaataataaactctttttggcaagcacttaaatgttctgaaatttgtataagacatttattatatttttttctttacagagctttagtgcaattttaaggttatggtttttggagtttttccctttttttgggataacctaacattggtttggaatgattgtgtgcatgaatttgggagattgtataaaacaaaactagcagaatgtttttaaaactttttgccgtgtatgaggagtgctagaaaatgcaaagtgcaatattttccctaaccttcaaatgtgggagcttggatcaatgttgaagaataattttcatcatagtgaaaatgttggttcaaataaatttctacacttgccatttgcatgtttgttgctttctaattaaagaaactggttgttttaagat

SEQ ID NO: 284 - protein, 880 aa, Homo Sapiens
MSRGGSYPHLLWDVRKRSLGLEDPSRLRSRYLGRREFIQRLKLEATLNVHDGCVNTICWNDTGEYILSGSDDTKLVISNPYSRKVLTTIRSGHRANIFSAKFLPCTNDKQIVSCSGDGVIFYTNVEQDAETNRQCQFTCHYGTTYEIMTVPNDPYTFLSCGEDGTVRWFDTRIKTSCTKEDCKDDILINCRRAATSVAICPPIPYYLAVGCSDSSVRIYDRRMLGTRATGNYAGRGTTGMVARFIPSHLNNKSCRVTSLCYSEDGQEILVSYSSDYIYLFDPKDDTARELKTPSAEERREELRQPPVKRLRLRGDWSDTGPRARPESERERDGEQSPNVSLMQRMSDMLSRWFEEASEVAQSNRGRGRSRPRGGTSQSDISTLPTVPSSPDLEVSETAMEVDTPAEQFLQPSTSSTMSAQAHSTSSPTESPHSTPLLSSPDSEQRQSVEASGHHTHHQSDSPSSVVNKQLGSMSLDEQQDNNNEKLSPKPGTGEPVLSLHYSTEGTTTSTIKLNFTDEWSSIASSSRGIGSHCKSEGQEESFVPQSSVQPPEGDSETKAPEESSEDVTKYQEGVSAENPVENHINITQSDKFTAKPLDSNSGERNDLNLDRSCGVPEESASSEKAKEPETSDQTSTESATNENNTNPEPQFQTEATGPSAHEETSTRDSALQDTDDSDDDPVLIPGARYRAGPGDRRSAVARIQEFFRRRKERKEMEELDTLNIRRPLVKMVYKGHRNSRTMIKEANFWGANFVMSGSDCGHIFIWDRHTAEHLMLLEADNHVVNCLQPHPFDPILASSGIDYDIKIWSPLEESRIFNRKLADEVITRNELMLEETRNTITVPASFMLRMLASLNHIRADRLEGDRSEGSGQENENEDEE

SEQ ID NO: 285 - DNA, 3615 bp, Homo Sapiens
gtgaccaccggtgctcacagcccctgtcacgtaccccctggcttactcaatcgatcacgaccctctcatgcggacccccttagagttgtgagcccttaaaagggacagaagttgagcatcagacgagctcggattttgagacgctagcctgccgattctcccagctgattaaagccactcccttcactatctcggtgtctgaggggttttgtctgcggctcatcctgctacatttcttggttccctgaccgggaagcaaggtgattaacagatggtcgaggcagctccttaggcggctttagcctgccctgtggaacatccctgctggggactccaaccagccagagtgacgcggatcctgagagctctcctgggtaggcatttgccccggtgggacacctcgccagagcagtgtgtggcaggcccccgtggaggatcaacagagtggctgaacaccgggaaggaattggcacttggagtccggacaactaaaacttggaagaagagaatttatccaaagattaaaacttgaagcaacccttaatgtgcatgatggttgtgttaatacaatctgttggaatgacactggagaatatattttatctggctcagatgacaccaaattagtaattagtaatccttacagcagaaaggttttgacaacaattcgttcagggcaccgagcaaacatatttagtgcaaagttcttaccttgtacaaatgataaacagattgtatcctgctctggagatggagtaatattttataccaacgttgagcaagatgcagaaaccaacagacaatgccaatttacgtgtcattatggaactacttatgagattatgactgtacccaatgacccttacacttttctctcttgtggtgaagatggaactgttaggtggtttgatacacgcatcaaaactagctgcacaaaagaagattgtaaagatgatattttaattaactgtcgacgtgctgccacgtctgttgctatttgcccaccaataccatattaccttgctgttggttgttctgacagctcagtacgaatatatgatcggcgaatgctgggcacaagagctacagggaattatgcaggtcgagggactactggaatggttgcccgttttattccttcccatcttaataataagtcctgcagagtgacatctctgtgttacagtgaagatggtcaagagattctcgttagttactcttcagattacatatatctttttgacccgaaagatgatacagcacgagaacttaaaactccttctgcggaagagagaagagaagagttgcgacaaccaccagttaagcgtttgagacttcgtggtgattggtcagatactggacccagagcaaggccggagagtgaacgagaacgagatggagagcagagtcccaatgtgtcattgatgcagagaatgtctgatatgttatcaagatggtttgaagaagcaagtgaggttgcacaaagcaatagaggacgaggaagatctcgacccagaggtggaacaagtcaatcagatatttcaactcttcctacggtcccatcaagtcctgatttggaagtgagtgaaactgcaatggaagtagatactccagctgaacaatttcttcagccttctacatcctctacaatgtcagctcaggctcattcgacatcatctcccacagaaagccctcattctactcctttgctatcttctccagacagtgaacaaaggcagtctgttgaggcatctggacaccacacacatcatcagtctgaatttttaaggggccctgagatagctttgcttcgtaagcgcctgcaacaactgaggcttaagaaggctgagcagcagaggcagcaagagctagctgcacatacccagcaacagccttccacttctgatcagtcttctcatgagggctcttcacaggaccctcatgcttcagattctccttcttctgtggttaacaaacagctcggatccatgtcacttgacgagcaacaggataacaataatgaaaagctgagccccaaaccagggacaggtgaaccagttttaagtttgcactacagcacagaaggaacaactacaagcacaataaaactgaactttacagatgaatggagcagtatagcatcaagttctagaggaattgggagccattgcaaatctgagggtcaggaggaatctttcgtcccacagagctcagtgcaaccaccagaaggagacagtgaaacaaaagctcctgaagaatcatcagaggatgtgacaaaatatcaggaaggagtatctgcagaaaacccagttgagaaccatatcaatataacacaatcagataagttcacagccaagccattggattccaactcaggagaaagaaatgacctcaatcttgatcgctcttgtggggttccagaagaatctgcttcatctgaaaaagccaaggaaccagaaacttcagatcagactagcactgagagtgctaccaatgaaaataacaccaatcctgagcctcagttccaaacagaagccactgggccttcagctcatgaagaaacatccaccagggactctgctcttcaggacacagatgacagtgatgatgacccagtcctgatcccaggtgcaaggtatcgagcaggacctggtgatagacgctctgctgttgcccgtattcaggagttcttcagacggagaaaagaaaggaaagaaatggaagaattggatactttgaacattagaaggccgctagtaaaaatggtttataaaggccatcgcaactccaggacaatgataaaagaagccaatttctggggtgctaactttgtaatgagtggttctgactgtggccacattttcatctgggatcggcacactgctgagcatttgatgcttctggaagctgataatcatgtggtaaactgcctgcagccacatccgtttgacccaattttagcctcatctggcatagattatgacataaagatctggtcaccattagaagagtcaaggatttttaaccgaaaacttgctgatgaagttataactcgaaacgaactcatgctggaagaaactagaaacaccattacagttccagcctctttcatgttgaggatgttggcttcacttaatcatatccgagctgaccggttggagggtgacagatcagaaggctctggtcaagagaatgaaaatgaggatgaggaataataaactctttttggcaagcacttaaatgttctgaaatttgtataagacatttattatatttttttctttacagagctttagtgcaattttaaggttatggtttttggagtttttccctttttttgggataacctaacattggtttggaatgattgtgtgcatgaatttgggagattgtataaaacaaaactagcagaatgtttttaaaactttttgccgtgtatgaggagtgctagaaaatgcaaagtgcaatattttccctaaccttcaaatgtgggagcttggatcaatgttgaagaataattttcatcatagtgaaaatgttggttcaaataaatttctacacttgccatttgcatgtttgttgctttctaattaaagaaactggttgttttaagat

SEQ ID NO: 286 - protein, 790 aa, Homo Sapiens
MTVPNDPYTFLSCGEDGTVRWFDTRIKTSCTKEDCKDDILINCRRAATSVAICPPIPYYLAVGCSDSSVRIYDRRMLGTRATGNYAGRGTTGMVARFIPSHLNNKSCRVTSLCYSEDGQEILVSYSSDYIYLFDPKDDTARELKTPSAEERREELRQPPVKRLRLRGDWSDTGPRARPESERERDGEQSPNVSLMQRMSDMLSRWFEEASEVAQSNRGRGRSRPRGGTSQSDISTLPTVPSSPDLEVSETAMEVDTPAEQFLQPSTSSTMSAQAHSTSSPTESPHSTPLLSSPDSEQRQSVEASGHHTHHQSEFLRGPEIALLRKRLQQLRLKKAEQQRQQELAAHTQQQPSTSDQSSHEGSSQDPHASDSPSSVVNKQLGSMSLDEQQDNNNEKLSPKPGTGEPVLSLHYSTEGTTTSTIKLNFTDEWSSIASSSRGIGSHCKSEGQEESFVPQSSVQPPEGDSETKAPEESSEDVTKYQEGVSAENPVENHINITQSDKFTAKPLDSNSGERNDLNLDRSCGVPEESASSEKAKEPETSDQTSTESATNENNTNPEPQFQTEATGPSAHEETSTRDSALQDTDDSDDDPVLIPGARYRAGPGDRRSAVARIQEFFRRRKERKEMEELDTLNIRRPLVKMVYKGHRNSRTMIKEANFWGANFVMSGSDCGHIFIWDRHTAEHLMLLEADNHVVNCLQPHPFDPILASSGIDYDIKIWSPLEESRIFNRKLADEVITRNELMLEETRNTITVPASFMLRMLASLNHIRADRLEGDRSEGSGQENENEDEE

SEQ ID NO: 287 - DNA, 3384 bp, Homo Sapiens
gtgaccaccggtgctcacagcccctgtcacgtaccccctggcttactcaatcgatcacgaccctctcatgcggacccccttagagttgtgagcccttaaaagggacagaagttgagcatcagacgagctcggattttgagacgctagcctgccgattctcccagctgattaaagccactcccttcactatctcggtgtctgaggggttttgtctgcggctcatcctgctacatttcttggttccctgaccgggaagcaaggtgattaacagatggtcgaggcagctccttaggcggctttagcctgccctgtggaacatccctgctggggactccaaccagccagagtgacgcggatcctgagagctctcctgggtaggcatttgccccggtgggacacctcgccagagcagtgtgtggcaggcccccgtggaggatcaacagagtggctgaacaccgggaaggaattggcacttggagtccggacaactaaaacttggaagaagagaatttatccaaagattaaaacttgaagcaacccttaatgtgcatgatggttgtgttaatacaatctgttggaatgacactggagaatatattttatctggctcagatgacaccaaattagtaattagtaatccttacagcagaaaggttttgacaacaattcgttcagggcaccgagcaaacatatttagtgcaaagttcttaccttgtacaaatgataaacagattgtatcctgctctggagatggagtaatattttataccaacgttgagcaagatgcagaaaccaacagacaatgccaatttacgtgtcattatggaactacttatgagattatgactgtacccaatgacccttacacttttctctcttgtggtgaagatggaactgttaggtggtttgatacacgcatcaaaactagctgcacaaaagaagattgtaaagatgatattttaattaactgtcgacgtgctgccacgtctgttgctatttgcccaccaataccatattaccttgctgttggttgttctgacagctcagtacgaatatatgatcggcgaatgctgggcacaagagctacagggaattatgcaggtcgagggactactggaatggttgcccgttttattccttcccatcttaataataagtcctgcagagtgacatctctgtgttacagtgaagatggtcaagagattctcgttagttactcttcagattacatatatctttttgacccgaaagatgatacagcacgagaacttaaaactccttctgcggaagagagaagagaagagttgcgacaaccaccagttaagcgtttgagacttcgtggtgattggtcagatactggacccagagcaaggccggagagtgaacgagaacgagatggagagcagagtcccaatgtgtcattgatgcagagaatgtctgatatgttatcaagatggtttgaagaagcaagtgaggttgcacaaagcaatagaggacgaggaagatctcgacccagaggtggaacaagtcaatcagatatttcaactcttcctacggtcccatcaagtcctgatttggaagtgagtgaaactgcaatggaagtagatactccagctgaacaatttcttcagccttctacatcctctacaatgtcagctcaggctcattcgacatcatctcccacagaaagccctcattctactcctttgctatcttctccagacagtgaacaaaggcagtctgttgaggcatctggacaccacacacatcatcagtctgataacaataatgaaaagctgagccccaaaccagggacaggtgaaccagttttaagtttgcactacagcacagaaggaacaactacaagcacaataaaactgaactttacagatgaatggagcagtatagcatcaagttctagaggaattgggagccattgcaaatctgagggtcaggaggaatctttcgtcccacagagctcagtgcaaccaccagaaggagacagtgaaacaaaagctcctgaagaatcatcagaggatgtgacaaaatatcaggaaggagtatctgcagaaaacccagttgagaaccatatcaatataacacaatcagataagttcacagccaagccattggattccaactcaggagaaagaaatgacctcaatcttgatcgctcttgtggggttccagaagaatctgcttcatctgaaaaagccaaggaaccagaaacttcagatcagactagcactgagagtgctaccaatgaaaataacaccaatcctgagcctcagttccaaacagaagccactgggccttcagctcatgaagaaacatccaccagggactctgctcttcaggacacagatgacagtgatgatgacccagtcctgatcccaggtgcaaggtatcgagcaggacctggtgatagacgctctgctgttgcccgtattcaggagttcttcagacggagaaaagaaaggaaagaaatggaagaattggatactttgaacattagaaggccgctagtaaaaatggtttataaaggccatcgcaactccaggacaatgataaaagaagccaatttctggggtgctaactttgtaatgagtggttctgactgtggccacattttcatctgggatcggcacactgctgagcatttgatgcttctggaagctgataatcatgtggtaaactgcctgcagccacatccgtttgacccaattttagcctcatctggcatagattatgacataaagatctggtcaccattagaagagtcaaggatttttaaccgaaaacttgctgatgaagttataactcgaaacgaactcatgctggaagaaactagaaacaccattacagttccagcctctttcatgttgaggatgttggcttcacttaatcatatccgagctgaccggttggagggtgacagatcagaaggctctggtcaagagaatgaaaatgaggatgaggaataataaactctttttggcaagcacttaaatgttctgaaatttgtataagacatttattatatttttttctttacagagctttagtgcaattttaaggttatggtttttggagtttttccctttttttgggataacctaacattggtttggaatgattgtgtgcatgaatttgggagattgtataaaacaaaactagcagaatgtttttaaaactttttgccgtgtatgaggagtgctagaaaatgcaaagtgcaatattttccctaaccttcaaatgtgggagcttggatcaatgttgaagaataattttcatcatagtgaaaatgttggttcaaataaatttctacacttgccatttgcatgtttgttgctttctaattaaagaaactggttgttttaagat

SEQ ID NO: 288 - protein, 713 aa, Homo Sapiens
MTVPNDPYTFLSCGEDGTVRWFDTRIKTSCTKEDCKDDILINCRRAATSVAICPPIPYYLAVGCSDSSVRIYDRRMLGTRATGNYAGRGTTGMVARFIPSHLNNKSCRVTSLCYSEDGQEILVSYSSDYIYLFDPKDDTARELKTPSAEERREELRQPPVKRLRLRGDWSDTGPRARPESERERDGEQSPNVSLMQRMSDMLSRWFEEASEVAQSNRGRGRSRPRGGTSQSDISTLPTVPSSPDLEVSETAMEVDTPAEQFLQPSTSSTMSAQAHSTSSPTESPHSTPLLSSPDSEQRQSVEASGHHTHHQSDNNNEKLSPKPGTGEPVLSLHYSTEGTTTSTIKLNFTDEWSSIASSSRGIGSHCKSEGQEESFVPQSSVQPPEGDSETKAPEESSEDVTKYQEGVSAENPVENHINITQSDKFTAKPLDSNSGERNDLNLDRSCGVPEESASSEKAKEPETSDQTSTESATNENNTNPEPQFQTEATGPSAHEETSTRDSALQDTDDSDDDPVLIPGARYRAGPGDRRSAVARIQEFFRRRKERKEMEELDTLNIRRPLVKMVYKGHRNSRTMIKEANFWGANFVMSGSDCGHIFIWDRHTAEHLMLLEADNHVVNCLQPHPFDPILASSGIDYDIKIWSPLEESRIFNRKLADEVITRNELMLEETRNTITVPASFMLRMLASLNHIRADRLEGDRSEGSGQENENEDEE

SEQ ID NO: 289 - DNA, 60804 bp, Mus Musculus
  misc_feature (1)...(60804): n = A,T,C or G
aagaggcttttctaaaggaactcatctagaaagcatcggactagaatctcaccctctgcctgcttctgaagcagaggtcttgcccctatatgctgctgagttcaatgaacagaggctgccctgacttcatggtttacaaggtaagatttagaaggcctgtgacgtcaagatctatagaccaactgtgatgagaagcagtcggggcagcctttgcaatgtgggtgagttctctgctggtttgtggtagtggtttctcttgggctctttgcacaggggcagcaccaatgccctgtgctatggtccaccaatgtgttggctctctctctcccttgcatagcaggtctgggtttggagtacaaagttgaaggatgctgtaagaagacacacaggcatccttatcagccaattccctgaagaaatgggaccctgaagagacacccagagctataacccagtagcagcagacaatggcctcggcacagattcaagtccctacatccctcccacgcagccttaaaccgacattccctggggagagttactaagcgggggccttatgtgaattggatgtttaggaccgtgccctttgctatatttaataggaatgggaaaaaggtcctttagcaagcagcatgtcgaagcagatattcccacaaccccctaagctgcatgcatcagagcagaggagaagagtagcctgctgcatgcggcaggaaacttggggaaactttgcttggattcctctccttcttcatacacagatagataatagatggacagactgataattgtttcctgcaaatggaatccaggaaaagaggtatcaaagctaaggctactgaacacaggaaggccaggtattaggttaagtaatacaggagaggatggggggagggggagggagaaggaggaggaacggaggctgggaaaattggtatgaaaagaaggaaatggcaaagagaaaaaggatgaaaaggcaattctaatttgaggcacaaggaaagtaaagaaggcaggctaaaagagggagagttgaggtggtctgaaaaaagtgcaaagcccagggtcctgagaaacttccgcgagaaagggggcgcggcgctgcccagcccatgtttgggcagattaatggagtcgtggcggctcgggctcttgagtcctgccttgggagggacagtatctgtttagatttgtgtctaaatttaaaccccgatccggcctccctctctgctcccctccactcccctcccctcctcctgcgtccctcggtccctccctccctcctcctcctccttcctcgttctctggcgcagggcccccagctggggcagtcccgcagccgagtgcagccaggcgcgcgccgccgcccactcgccctgtgcccgctacagccccgaaagtgacccgggctgggagccgaggggacagcggggatcgtgggctcttaacccgagagagcgggcgtatccgcagccggaggaagactacctggaggacatggaggtaaaagaccggcggggacacgggcctgggggagagggaggtcagagcgctcctgcccaggtcgccgttcctgctctcagcagggagcacgcagccgaaaggtcgcgtaggccaagttgagaaaggctggtccttgctcctcggagacccctgtgggcaggcgtgggcttgtcaggaaaggacttcaggcgaaggaggggcctttgtaggggttcaggtattctgactgtgcacatacgtgctttggggggggggtttagaaaataaaacttaggtacaactaaagtcataaacggataaaggtgtgaaccaagaaccccaaaacaaaactccagcaaccctgactcaggcattgagaaacagagttggcagttgaagccgggactctgcccgcatggcttcccgttttgattgcagtgtggcttttccgaccagttgttctcttacttctgatgccccttgtttctgtcacatcttctttcaaaactttctgaaaagctcccttgccgccgatcagataaacttatttctgagatattagaggctctccaagatgccctgcctcctgaggttgtgtgcaccttggggtgtggtagccgtatctgagaggtttgcaggggcgagtcccagactttctctgcgcttctccaacctcagtggagaatactggccactactttccatccagctagttcatctagcttcctcctccaggtctatagatttccaaagaaatgtttcccttcaaacccagaccagctgcaggtgaactcagaggcacagcattggcaaagccccaggttcaactcccagggtcacacactcaaagaaagaaaaagaaactgtgaccttttattgtattctaatcaatctcagtaggacctgggattttcaaagaggaaaaaaggagatgaaaacccacaggcctaaaggtgattcctcctcccactcaaaaggaaagagctcctccttagcccaaggtctgcggagatcccgggcacagaagttcaatcccttccaggcttgagtccgctcatctcttctgagcttcactgtctgctctaaaagaacaatagcaaggctgcatatttagctcaaccagttgtcctaaagtagcaaggttgcattttgcattctgggcacttgggagtgctgagtacctggggggctggggtctgagatggactctctgtagcgacttgtgcaagtcaggaagcagttgattagggtagctagaccacaaagcgttccagatggatccctacagatggtcaagaccttgcaaactcaaagcaataggattctctgtgctgactactgctacaggacagaggagagaaacagaggggggacctgggagaggttcataaagaaactgctgtacttacgagccccctcctcgaggagggctcagggtacctctggtgacaagccagaagccaacagagctgtaatggacacaggatggaagcccagctggacttaagcaaggtgttgcttgaaggcccccaatgcaagctctaactttaatctagggaaacacagaaggggctcccttcccaggcccacttcttcctccctcagctgaggaagaaacagagggagtccaaggccctgaaagtatcagcccagcaacttcctgtgtggcttggtaggcgggaggcacgaaaagagaaggctctcctgtctacaagctgatatatacagtagcgaaaaaaggggttggatggagagagccaaattcctatgtgccaaaggctggaccagcacagggaaattgcctagtcaaccagaaggccagacagatccgcttacacccattcaccctgaggtgtgccatggccttgagggcccacggtgactgttttttgaagttcctttccagaaccagtcacaaaagcccaaacaaacaagcgaaacaccacaacaggtagcagctgagctgttgttaaaggaagtaaagaggaaacagaagacagaggaggctacgagatnnnnnnnnnnnnnnnnnnnnnnnnnntatttgagaagaaatggagttgccccatgtccccatattgagcattcaacccagggccggttaaccacattcaggctctaccccacacttgcctaccgcaaatgttagggaaatcttcaaatccctgtgaccactgtctcggccacattaatcacacctcagccttatagggacctccctggaataaacaaaagcaagatggcacttgacctgtgcctttctaacactcccaatccaatcgaggaaatgagactcacacatcctgtccctgtgtgcttaatgaatgcttctgcaagcgtggcgtgtataggccagagtagatgctgctcagaagccctgagagaaaggcagtgactgggaagagagatgtagggacagggagaatacactggcttccttcagggaggcagaatggctgattgcaggggcaaatagggggatccctaaaggaaaaaaagtgaaagtaacaagataaagtcgtggaagcagtgaggtcccccccagagaggtagccactgggggccaaaatctaagccccctagaaggcattcctttttctccttccctagctgtgctcccaactcctaccttcctgtaatttaccattttcagaccttgaaggcggttcaagaatggccctggattctgcctcacagacagtaggaaactgagaagtctgtatgaggtagcaaccatagcaccacacattgcatgtgcaaggtgctcaagcgacagagcccctcagaggctctggatggggtgtagcctgactccaagagaaggaaagagagtaaagaccatgtgctggagggcaagcagaaatgcctgcatttgagttcaccagggtgcccagaagagaggacagggtgcttacatagcaggtgtgaagtcctgggtttgatccctagcagagggacagaaggaggtgggggagaggaagaagaaaggagaggaggagggagggagaggatatatctcactgtcttactggtggatgggtctccataaaccaacaaagagcctatcacagaaacccaagcttcctgatacaatttgcctaataaattaatagaaactctgccttcccagaggccctcggcctctacagagcacctaactagtcccaccagggcaggctcttgggcttccagtaaggaggaagggaccatactttacatatctagggcctcatgagcaccaactaagacatgctgattgggtgaatatgttattggagacgagagacattattagacttttaagagagagagagaggagaaaaaagaaagaaaggaaaaagcgggctttagtgtgtttctttgctggtttgttctgaacagcatttcagcactgtgagacaggcagacctccttggctacgaagtcattgtctctagaaacaatagtggtaaagttgttggagataggaagccagggaaaacagctttctggcctttgagggcacctgcatgaatgtgtgcatacacataagtaatgttttcaaaaaaaacaaaacgatctgagagtagtggtgtacaccttcaatcccagcactggagaggcagatgcaggtggatctctgtgggttcaaggtaaacctggtctacagaaccagttccagaccagccagggctacacagtgagacaaaccctttctcaaagggggtggggtgtgtgtaatcaagctgggtgtattagcccatcttttaattgcaacacatgagagctagaagcagcagagccaagttaaagattatctttagtcaggcgtggtggcgcacacctttaatcccagcactccagaggcagaggcagggggatttctgagttcgaggccagcctggtctacaaagtgagttccaggccagctggtgcttcatgagaccttttctgaagaacacaaaatgagatgaagctatcttttcatcctcataagtaatgtttaaaaaaaaaaaaaaagaagatctgagagtagtggtgcacaccttcaatcccaattgaataccaatatattacatatattatattcattttgcaacctatgtatttttcaaaagattttatttatttattttatggatatgaatgctttatctgcatgtaccctgcatgtctaaagaggtcttcagatcccattatagattgtcatgagtcaccatatggttgccaggaattgaactcaggacctctgaaagagcagccagtgctcttaaatgctgagccatatctccagccctataacctatgtcttaggttcattttttttaccttgttaaacatttgctagtttattttacaaacattttaacacattaaatgtttgtttcattaataataattattgttgtatgtgtatgagtatggggtttcccatgctacacagtgcatatggagatcagaggacatttttcagtagtcagttttctccttccaccatgggaatcccttgggggaacccagatcagattttcttgctcacccagcaagcatatttacccattggaatagcttccctaaccccctacctcatttttatctcatttatttattagaggggaaactccaagtttaggtaagaaggattatttggggatgttcttgtgagccttgctggttttccccatcctgtcactgagccatggtgtgctggttgaggctggtggtcataatggggaccagtcgttcctctgaagggggagttagactggatggacttgcgggcaagcctgagatacccactcctcctctcgcgctcctgctgggtggagacccttgcagccactctggctctccttagcaggcatctttcacttgctgggctgtgagaacaagagtagtttcgggtaggcacgctgtcaagacccggccctatcacggtggggtgagagcattcctggaacggagtcgggtttcagagcctgatcctcagcaggctgcccacagcaaggagggctggagcctggctcctgcggttccgtgggaaatctgaacggaggcggctcagcagcacggtaatcttatcagagccacagaagaaagcctttcggttccagagaaggcaactctgccttcctcttgtgacagtgtctgaggtttgcagggccagtctagcctatctaacccactgggaaaaggcacacaacacagccctgggagtaacaagacagtccctaattgctcctgctttactgggaaggagcaaacgggaccctgaggtatgctggggctgtgagtgcagtcggacctttggaaagcagcaactctcggattctcttatctggggagtagtttagcccatgctcgaagaagtcagtctcataaagtgtcatcaccacagcaacatgtggcctgcatccacccttatggtgtcaggtggacacatctctcagagatgccataggcagagtacaaacattagagaatgggaccccccacgaacccatctcccaaacggagccagaccagagaggacattgcctttgtcctttggtctttgggacagtgtcctttctacctttttctcctttggggcgttctgaatactggctatggagatttgtggacattaagtggtgaacccgtgaggctcacgatggaaagtcacacctttgggcggatcagaccctgttctagtgagaaggcttcttctgattgccattcaagactcagtagctccctaggaaaggtaaggtggacttgcaggatctttcccttcctaagtctcttcgcctgaatccccggctggaagctcgtagttctggccattggtcttcctagcatcatagatgtccctgtaccatctcagagctgtcctctgggcctgtggtaatgacaacccttcctccagctgagtcttctatagtctattggtgtccgtttgcaagataacagatggctgttttgggttgttgctgctgatttatttgtgtgcgtgtgtatatgccgaagtgcatgtggaaaccagatgtcaacaccgagtggcttcctaattgcactctgtcttgcatttctgagtctctcactaaatctagagcttgccgattcagacacgggtcaccatgcctgacacacacacccccccccttgtaaactaagtgctggggactgagtttcagtcttcacgcttgcagagccggtatctgattcgctgagctatctcctctgcccacagaactgtttaattaggattagccaacacataatgatcatttacagcctgccaggcactgggcctctatctgtgacccatctctcaccttgctgaccctctcagaggggaaacaagcacttagacccttaattgtagaacaggatgagagcttgccccactggaggaggggtgccacacccagcctggggctcagggagggcttccggtgatggatgacctctgagttgagtgttgagggagtagttgaagttaaccaaccacagagaattaggaagagttcattctaggcaaaagcaagcctcacaggatgggtgttgattcctggaaggtcaaaagagataacaagctttgagagggagctctgagcggtagcagagaagcggagattgccgttactaccataaaaggctcttttctatttggagaaacaagagctacacatatgacaggacatgttaaaaatacaagatgtgatcttgattagctgggaggtgtgagaggtgtatggagtttaaagtcggcttcttctgtgtgggagaaagagaaagcgggcttcctccttgggcttcccctccaggtgcttcccctccatcatctgacagccttgggggcttcagtctcagtgagatcactcctgtctgccactcctactgaggacattcagtttgacacagggtcttggccccaaggggagtcttccatcaagtccaccaaagccatcttcaagaccaccnnnnnnnnnnnnnnnnnnnnnnnnnnnnnnnnnnnnnnnnnnnnnnnnnnnnnnnnnnnnnnnnnnnnnnnnnnnnnnnnnnnnnnnnnnnnnnnnnnnnnnnnnnnnnnnnnnnnnnnnnnnnnnnnnnnnnnnnnnnnnnnnnnnnnnnnnnnnnnnnnnacacacacacacacacacacacacacacacacacacacacacacacacctgttccactccccctgccgactggctcacatctcccattgtggtcgccccttctgctcactctgtgaaaaaaaacaatttgtttctcactgtctccaaccagcccaggggtgagccaggtggaccaaggagcaacagcagaccaaaggcacccacgttagccccacccagttaaaacagagcaacggaaatgaaaggctgagcctgtggttcctgttgcacaactcaggcacccaccagagagggcattttcatctataaaatgccatggaaggcttccacctcctctgaacctccctccctgctcgaccctcaccccgaagggttcattccaaacacatgagctacagggccgcttactccagcctgctgccccacccccactctctcagtcctccagaacacattcttgggcctcaggtccctgacttgtcatgcttctgagatacgaactgatggatagtgggaaattcactccgagcagccacagccgtggcggcgtgggcaaacatctaaaagctctcctcacagtggttactacatgttacagacttcctagctgtgggtgttttccataaatggatctttttaatccttataaagtctttctgcatttgttttctggacaagtaaggggccgtgttgctggaagatctggaaggtgattgttccgagagccacaagggtgctactccgtgtgtgggggtctagggccctgtgctttctcttcttctgcctggaccatcttcctttagccattgctaggctaggccgctcaacacttggagtttttaagacctggatcagctgaattaattctgatcctcatctaaaagacatcaagaagactccattgtgacacccgccatggcaaggaagtggaattttgaaaattcatttttgttgttaagttgtgtttttgttttattttgttttgttttgtttgagacaggatctcctgtagcccaggctatccttaaattcttgatccctctgctaccatttcccaaatgccaagtttataaatgtacattacgccaggcacggtggtgcatgcttttaatcccaggggagacggaggtaggtggatctctgagttcaaggccagcctggtctacagagcaagttccaggacagccaaggctacacagagaaaacctgtcttgaaaaactgaaaaatttaaaataaatacatttttttaaaaaatgctttaaggatctttagagcataagacctcagaaagtcaaatgaactcagcagtttctttcgttcccctttactttaaaggtgggggtccttaaactggatgtgtggataggcgtgctgggagtcagtagtggctgagtcagaactatggcaatggccttctaaccctcagggcactctctacaggacatgttggatccacatgcctgactcacatgcactttgctgtctctgcagcgcagagcctcgccttctgccggctcactgccttctgcaggctctccccggtcttccagactctagggttcagtgtgtctcgaggccctcccagccaatctttattctcagtgggagttgggagaagaacagttttcattatcactgttttaactagaatcaggagaccatgagccaaggctagaaaaggtccagcctcgtccaagtgcagcactggttctctctcactgggctgctctccaccttgagggaggttccctagggagatttgtggtccctgttggctggtcatggccatgtgtcctcatgaatactctggggagagtgaggaagattctagaagtttttcttgtggaagtgtgtgggaggctcaatgagagaggctcactggtctacctggtgctctgggctgctggggaatgggacagatggagaagccaaagtcaaggaagttagccagtttgtgcatttgctaagtgtatgcatctctgctaagagatggccatggctggtgttagctagaccatgctccttcctgaggctccgaggaacaatcctcttcacacctctcttccctcctagaacttgctggctctggcttgaggctacatccctcttctctctatgtgttcctaacagggacatgtgtcaccaaattttgaccctcgataacaattcaggattatgatcccctcatttaaaaaatccttaagtccctctacaaaatctctttttagaactaaggttgtatttacaggttccagggatgggggcgagtatgtgattagggagccactaatcaccgcttttgcagcaggaaacttgttatccatacagccgttgggggcttggggatggatagggaaaatccttgatattagattgtagtgtaagcatccttactgctatgctcaggttaacatcgaatgaatatagtggatattcattagcatttactgtgtgacaaatttctttcccccttaggtagcccattccacttttgtcttctttagacttaaacgggtgcagagctcagctacagcttttcgctgggagagctgctgttacgaaggggagtccctggggtgcaaaaagcatatccgaggagccagcctcttctcctgatctcttctcttgctagtgagactagctgggctggcaggctggcaagagctgatcaagacaggtgagtggatagctcggttgtgtgagtttcaagccaggtgaacgttgctgtaacaaacaaggccacagttctagtctacacagcaagcgcctgttcattccgacagtgtgatatgaccgccatagcttagctagcccttcacctcatcatttgtcctttgtctgagacctggaaaggtgacaaatagccacacagctcctcacaaccaccgagcccaaatgtatagttcctcctaccacctcccatgtcgacgtgagctagaaagactgcttgtggtggcttttataggccgagggagtcttgcttcacagagctgcccatctctgagctggtctggaagcaaagctgtgtccttcaggctgctgaaggtgggaaggctgaggaaggcatcaactttacccgccgctcagtcttgggctctggagattgtcagagctctgtggtcagatctgctcttcctggttgaagtaaaagttgctttgcaagcagaaagcttgttcccagtgatgctaactgctctctgggcttgggggatggtttagaaaggcaataggtttagaggggaagtcaagagtgagtttgtgtgtgtgtgtgtatgtatatatgtgtgtgtgtgtgtgtgtgtgtgtatatatatatatgtatgtatatatatgtatatgtatatatgtatatatatgtatatatgtatatatgtatatatatatatatatatatatatatatatatatatacacacacacacacacatatttctattggagacatctatacctaagctattagttgtggcttcttggacagtttcttaaacatcttggtcctggaatagcccaatccacagagcatgctgtcaggagaagcagtttatagctttattgactcctggaatttgaaaacctttttgccttttgcagccacacagtgttaaatcaccccctttgatttttaaaccccgcctctactaccatcaaacagggaccctaagcctttccctgcttgcagttaatgacaccaatgatcaccattcttttccatggcccttgttcataagtcctgccctctgtgcctatggaagggttagtgaaggtcactggaacttggcggtgatgttgaaggacgcagtccaatcattagacttgtggcaagcccaggagggcgctgcgccagagggagatgggaactctgagtgtcaggctcaggggttgatagcaacgtcatagtctgttctctatcagtaaaactaatgtcgctttaccatccaggctgtcttaaaggaaatctgatcatgcatgtcccagataagataattgatgatgtcagcttgaaaagctacagagccacaaattcatggtggtggtgtcattaatacttaatcaattaatgtttgaaaaattgtgataactcaaacaggacttatagtataggtgttagaagaggaggtgatgaagggggcatgagcagagccttgagacaataaggatcataatataagcaaggacatttatacagcatcatagtggctctggaggccgagcacagtggctcacaccttgaaacccagcacctgggtgacagaggcaggactctttgtgagtttgaggctagcctggtctacaaagcaagtcaaccagggctattacagagaaaccctgtcttgaaaaaaaaaaaacaaaaaacaaaaacaaaacctaaaacaaacaaacaaacaaaggtaggtctgggccagaaatatagcttagtttatagagcatttaccttgtatacagagatccgggttcggtccttagcacacaccaggtatggtggtggtgcatgcctgtaattcaagcatttgggaagtaaaggcaagaggatcagtgagttggaagccagcctgagctaaacagcctctctcaaaacaaaaacaaatcaaaggttctggggccagtgagatgtcttaggcagtaaagggcttgctgcccaggcctgatgacctgagttctatctttgggtttccatgtaagggtgaaaggaaagaacctactccacgaagttatcatttgactttcagatggctgctgtggcatgtatacatccccgtatgcacatatcttacacacaataacaacaacaacaataaaaacaccaagttctgacctgggccgtgcaaaaacacttttcttcgcttctctaaagtggaagatctaaacacattggccacagaccctatgataagactgatacagacacagaaagcccttgtccctgcaggaaggatcaatcataggttccctgtggatctacatgcagatggtcacatgcagagacagtactgtaagagctaaagagcataggtccaggagccaagtagctgagattcagtctaacataacccattcactagagtgtgaacagtctgaccttaccattcactggagtgtaaaatcctgcactctagtctttagagaacacctctgagttaactttaggaaaagggccaggtgtggataatgagccagggagggggctgttattggaggaaaacaacccatgcagttggtgcagctttgactgggacaccaggacatctgaaggtcccctctagccccagggtttgtggcaacctagttattgcagaccacacacaagcccacctctttggatttctgcagacagctggacctggtgtgaagtaacagatcaaagctgtaggcccccagggcagccaaggcctgctagaggaagggagactcctagacttaaatgtaaaggaagggaggagaggagacaactgtattttatgccttcaacctggaggagtgattaagagaggagacaggaaacgaggaaaagatcagtcactcttgatatgggcacagacctcacaggatgcctaaagtcagagcaccacattaataatgtaatgccttccctatctatctatctatctatctatctatctatgtatctatctatctattttttatttcactcatatcccaggctggctggcctggaacttgtggcaatcctcctgcttcattcagcctcccaagtgaagatctggcaagtgtgagctaacaggcctgtctttgccttttctatcataattacagcatgtgctgtggtcataacctttatagtgtaaggcacacttgtaacactactatgcacgattttgttttgttttgtttttcctttgtcacagttttatgggtagagcattcaatcttacagggtcttagcagctaatttcctttttttctaacttattggggaaaaaggtgcccaagcttttcacctgaaggaagtacttcatagttactcttgggcatatccgaatcattgctgctgctgctgctgctgctgctgctgctgctgctgctctcatgctttgaggccataaccaagtgagatcaagttggttaagcatgaccggcaacacggcagtaggtccaatgttagccagcaagcaggtagcgtgtgcagaaaggatatgctggcggacaaagaaagcaaattttgtaactggtaacttctttctgtttgtgagtttccatttagtagttttggatagtagttgatcatgagtgattgaaagaaaaatacaatatatagtcagcccactctcagcttcctctcggtctcccacatgcccaggacactccacccacccagtgtccctgctgaccttctgtagggaggcctcttggggagcagaacagagtggagtgcctcaggagcccagcagggatgggaaagtcaacaacagacataagcccacctctccctccctctcagctgacatcaatcaagaacttctcgctggatttagagaatcaaatgttttcatatatcagcaagggtattctgacttctcaaatagtcacattatattacaaaggaattttttttttttgccaagacagattcagagtagattgagctgcctctactaaagtaccctcattagcgaccttgggtcttccccgaggacagtctccagtggcaagacgcagattctgtccttggcatgcacttgttaaatatttttgttaacgatttgaatgaaagctagaaagaatccagatgacccacagctgggatacttaatatgatacatgacacattcgagttcaaaatgatttatataggatgggactcggggccaaagccaacataatgaaattaaacagggataaatgtgaagtcccctgcttagctttggtgtaggacagacctggctcagaaaacccacatctgtttgctcagtctttctgcaatggttttgcagctagctgcacaaagaatgctgtctgtcttcttggagagagtaaacgtagagatggtgaactggaggtgtagtggtggcgggaagtcctgtgacccccaaacgaagcaagggatagatgtgctgaggatttgaggagaaaatacattctccatttatgcactgaaagtggttgttttataaacagatagcgatggtgaaaggccactggtcagtgacctgcagggtctctgatgggcgcggtgcacacatatgcctgacacggggatgggccagtaggaatgcatgaggcaaatctctgtgctgactagaaccagtggatgcctcctcccatctgtaatgagggccctggaagaggggctttcaaggcaccaaagctgtgctgacaggctcgtaactggccccagtgcattgtgggtgaagaaaggagaggcagacatatgagttgaggggctgaagtgctagagagaggtggccttgggattgagatggcaaagctgcaaactcagccaaggggaggatggaggtggggctccagtccgatactctccttcaaaaaagaaaagaaatgagaaggggaagaagtgaagtggaggagaggggagagaagtagaggggaggaggaaggaggggaggggaagggaggggagggcaggagaagggagtggagaagaggggaggggagcaaaggagaggggaagagaggagaagagtggggagaggaaaggagaagagatgagaggagaggggaaggaaagggaggccaggggaggggagggcaggggaggccaggggagggcaggagacaggagaggaggtgacacaagagcagaaaggggaggagagtaaagtaaagaggactcactctcaggctttatttccatcgagtaaagtctggccctattagttatccacctaggtgacccctggaatttctgggcccccctcctccttcccctcaagctccaggacaggggactccgaggagagtctgcaggactgctggcccgtggctgggaggctaggaaatggtagccagatggagaactccacagatagagctatttgttcattatgcaaaaatgtccgacgagtgcctttagaagctgtcaagctacaggcccacacagcaggtgatttataaacccaccgccaggtactggagagctccaaatgaggcatgttttcattaggatagtccatgatgaagttgcaattaggggtggggtccttctggaaaaccctagcatttgagttcaggggtttttccatagtttctagtcacaatcaatcaaacaaaaaaccattaatgtattaatgagggccggaagcagggccatcctgacaccaaggccagcctagactacatgacccaggtgggtctctcctcctgttctgtctttgtctcagagcagaggtggcatggggagaaaacgatgatgccactaaatgtgactgtgtccagctctgtgtgtcttaattgttcttagccacatgcatagttctttttaaattattattttttattatatgggtatgagtatttttgcatgtatatgggtgcctgaccaagccagaggaaagcatcgaatcccctggttatagataattgtgggacaccatgtaagtgctggggattgagcacagatcctccagggcccttagctgctgacccgtctctctggcccccacttacacaatcataacaagcatatgtacatacaactctgcactgtaatctttttatttaaagtgatttgcaagatgatatccttggccttacaaagttgtattttcgttttaaatgtctgctataacaaatacaccatcatttattttattatttttctattttgagtcatggcatttgcttctactttctctgtgttataaataacatagctataaacagtacatgtatccttttcttttaagcgatttctttggaagcaattcccaggagtggaattattaggccaaaggatgtggatatttttatgactcttgatgagcactggtacattgctctgcctgcctttcctccacacagcctagctgtacctggtctacacaaactgcaggctcagcaaagtggtggggggggggagaggtgagagggactcacaagtgtatccagcaggcggtctgctccttccagtgccctgctgcctgtgagtcctgcggtttccgctgggagggggagagcaaggcagggcaggaaggggatgtggacactgggaaatgaagcaaccatttggtacttcctgctgaagcatctgtagatgggggaaataacaggctagtgtggtgtgtgcacacacctgtgcttgtgtgtgtgtgtgtgtgtgtgtggccagggatagagcaataccagagtactgggttaatgagaagggaatgtcttttggaaatccttcacagtttagtgtggtctgtctgggtgggggaggagcagcaatcactaggtcactctctcgctggatacactgttgacaagtacctactaggtcagtttctttactgggtctggactcagtaggaaaatgacttggctcctgtcttccaaggggaccaggggctttgcagtcttgtgagggaatcagaaagatgacagatgatggctgcagtgtgatcaagtgttcaagtagatatgacctaggtatcctgtctaaggaaaggagcagatgggacgttttgcaaggagaggtgatcctgagctcaacccaacttgaaggacaaatcaggggcaagttgcagaaggatcgcactggaggtgagagagcttgtgagtgtacagctagttacctgtcagaccttcctaccatcttcagggcttgggttgagaggacccaggatttctgcacagtctagtttcaggggaaagtctcagaggctagcctaaaatctgtgcccaaatagtcaacaccctgtttcacttaaactagatgttcacaggtgtggctatttggaagagctctcccaagccactccatggggttacctctcattttatccgaagagcaatggggtcaggaattgtacaaatatactaagctcatttgggttgtgcagaaagaggggtggagattgcaggctgtgaagtcctttgggggctgctcaggcatccgacctcaaggccaggagagctgggcttcttggggaactggggagggagaggcagggaaaggcgagaggaggacctttccttattgggacaggactttttctacccaagatctcgaagactaaggagcccgggttttagtggggatgccgacgtgcaaccataattgtaagaacaggcagataggaactagacttcctgtttccatagcaacagcaaggagctcacctgggcctctggacacgtgcatttgttggtgtggtatgtttgagaggagaatgggaactttaaggtctttaaagtctaactgggcctggggatcctagacagaactccatcactaaattgctatggagtactgaatcaggcatgcaaggtctagagacctcaccagggtataggtttttttttttttccctgcctggcttgctggaagaattgaatgagataatatattcatagacaaagacttggaagagttgtgaagttccccacacatgaaaagtattgttaccactgtccttttaaaaatgcaggaaatatctgggaaagatttagttccttaacagaaagcaggtgccctgaagccaggaaaggtgttgggagtggggataaagctgaggacagccacctgtctggggctctaccctcttcttgtgggttccctttgatgttccagaggctgttacagatgagaagctgggcagggcagagtggacagctcacttgcaggcggagactatgtttgaaggggacaatcagcactttctgcttccccagaagagggttgagtgctggtgtgagacttgcagacacacccgttgctcagccactcagcataaactatcacagtcgcagcaaagaccgcgctatcactccatctgtccaggaaaagagtttaaattctagaaacagaattctaggtaagaatagaacaagaaagacagacatccagagtaatagcccagccaagagttctgcctttgcaaagtcacaatttgggtaggttggggagacggcataggcagtgagcagaagtgtcatctgatggctcagccatcagatgaaactttctcatagacccggaggctgggcgtatgaaatcaaggtagatgagttgtctcttctgaaactgcacttcaggacttgtacgtgatcatcttcttgttatgacctcacatggtgtctgtgtgtctattagtcacctttcttgtgagaagaatacctgatacaggaggaaggctttatctgggatgactgtttcaaaggtgccagtgtctcatggcaggggttggggccacaacaacatcaagaaatagagaggggcacaagaaggagctaaggagctggggaccagatatttatgaagagcacacattacctccccacaactcattctccccctccccctcccccaggatctatttccttcagccaagtcccatctcccagagtttccaactcccaaatgtcctaaggaccgaccaacagaaggaacctggggatgacctttcatgttcaagcgtgcgtgcgtgcgtgcgtgcgtgcgtgcgtgcgtgtgtgtgtgtgtgtgtgtgtgtgtgtgtgagattatctcttcctctaaggcttcctgccttggttctctcctgtatccctttgtgtctgtagtcagtgggatccaagtcaaaaaagaccacccacggggcgggggggagggctgaagagatggcttagtggtgaagatcactgtttgctctcacagaagatccagattcaagccccagcacccacatggtggctcacaaccatctgtaactctagttccagggaatcgggggccctcttctaatcttcaggggcaccaggcacatgcgtggtgtacatgaatacatatgacagacactcatacacacaaaaagaaataatttttttttaaaaagaccaccctcaaagctacattttaacttaattatctcggtataagccctatgttcaaatactgttgcattctgaggtgttgaggaccaaggcttcaacaggagaactatgaagggctcaatctgacccatagccatggcctcagccctgaacctcactgcctagtgtgaatgagaatgggaaggtctgcctgggtggtggtggccggcgtccttaaccccagaactccagaagcagagacatatcaatctttgagttccaggctagcctggtctacagagtgagttccaggacagtcagggctacacaaagaaaccctgtctcaaaacaaaacggggtgggtgggggcggtagggggaatggaaaggtccaagcaggtagtaacctctctagctgtcttactgtttctgcctgacaatgtcaagtgctctggacagcacagaccttgggggaattcgttgacctcagttgaccttgtcctgaagtcctgcaagaagttcttactgggttgtattctcctgtgtttactctatgtgagaaagcccgtctttccatttaagacaggagagaggagaagggagtacaaatgtgaatggaacattcacaggaggcatgtttccgtgaacctgcccccttctcccttatacctacagtccttgctctaagagaggtagcgacataatgagtctcagtcaaatagactccaagctagttctaggagtgtatgtgtccctccccagcccccatcttcctcagaggagtagagcctagatgtttcctgtcacccagccatccccaatgccttttcccagaggacagcctagctgggttaccaggcccaagagaaagaaactctcctacccctggcttccacctccctcccagtttttcatccccatggggccaccattcctttcttatcactggaccaaccggaaagaatttacgggtgaaagaactgaacccctttaaagttgagccctctctatagccatagatgtgaaggtattttcaggtcctaggaccaagcaaagatccaagcaattgtccctaaaactgggctgctccttcctaaagacgtacatggttgctggcttgggaaaacacagattgtctttctggtggttattttcaaattgtgagaggtgtgaacagccctaggctatttaaaaaaagttaacatttttgcctagcttgcagtttcctctccagtctctgccgatgcttggcactgtatcccttctgctaggttactctgcgcaattgctatgggttttccagccattttgtggttgttgtcattgctttgtattcatctcacagttccggaatggtgtgtgtgtgtgtgtgtgtgtgtgtgtgtgtgtgtgtgtgtgtgtcctgttcagcaggagcataatgttttacgagctttgtgctctgtgattgacttcagatctttgaatctcagcaatcaggtggtttccattttttttcacctttattataggaccagcaccgtgcacatacaattctgtgtaaataaacctactttctctacttctttagtatatattctaaaaatatagtatagcgtatcagaccccttaagatgcttttccagatgaccgcaccaaaagggggcagaattaacccatatgtaatgcttacagcactttggaaggaaccgaccctcaccgtaagctggcagctttggcttctcgccacaacgacacttcgggttttctgccaatctgataagctggacagcagtgcttcgatgcttagccttcccgggtgggaactgtgggttggtgttttcttactggagaaggctgccttctagagcttgctttgcccagatttcacacccagggacctgggagcctttacttctactgtctcctttagactctagcaatggtgcacaagcccagattcatgttaggaacacacagggagtttgtctaaattctccaggccctgggaactgttggaaataaaagagcagagctgagcagtttcagctaatacacagggaaccaagtaagtcacagtagccgggcgcctgaacccccaagcccctcagccttctcgggtgcctgatgtcttgaagccagctgattttttgttgtaaatctgttgtatgccagcctctctttcgggcatatggggaatccaaggtagaggctatggtaccaaccttcgtgagaaggtagggacggagctccagtgcaataaggcaagtggtgtgagagaggatgaggggaggggcggtgatgatgcaactcagggagaaattccgcataactcctgggagaggtagcaaggagctgggacgtgggggataacgagcaatccagctgggggcaacagggccaaggaatctgaggtccaggaacaccatgtgcatgagggtgtctcgtgtgggtgtgtgtgtgtgtgtgtgtgtgtgtgtgtgtgtgtgtgtgtgtaaatgcagagtgctgagggctgcaagaggtgtgtgatgggaagttcaagggcctggaaagaggcctccagggttgggattccagctccaccacagcattgaggcccccagggaagccatttaggctccttgagttccagctccatcatccacattgatcaaagtgcctggcttggaagaccttggtgaggactcagggctcgttcccatggttcctccacatggtgaatgttcagtgagtgttggcaactgctactgaggaagggtgaacttctcagaaggatagaccaccaggggccttacattctacgtgggtcaaatatctctgattagaactgcttgggaccagaattgttctttaagattgtttctactttgtgtttgtttgtttgttttgttggagacagactcttactatgtagttcttctggctgtcctggaacttgctctgttgatcaggatggcctcgaactcacagagatcctcctctgcctcctaagtgctgggattaaaggcatgtgccactatgcccagattaattctgctattttaaattatgtatatatgtctgtgtgagggtatgtacttatgaaaggccagaggcattagattctctggagctacagttataggtggctgtgggctgcctgacatagatgctgggtgctgaactcagcttctctggaagagtagcgagtgcctttaaccactgaaccatctctccagagcacaaaaaaattatctttaatcttagattattttcaggttcaaatcggtggctatcttgagttatttgggatgcaaggaaaatacaaacataagattcccgtatgcttcattaacgcctcttacatataggctgatgataattttgtgatacctttttttaatctccccccccctttttttttttttttttttttttggtcttccttcattttggcctcctcctatcacatgagattgggtatggaattttctgcttgtgctgtcatgttttcatccaaagactttggtatggaatcacttctggttaaggatttgaagattcaggctgttcgacctgtacaaagatgttcccagcatacagtgggtagcatgaaacaggtaaaccaagtaagatcatgactgaactcaattttgagaatgattatctgggaagcagaaggaaggttggtgaaagagcagagaaagcggtgatacgatacaagcatcaccagtggctggaactgagggagaggggatagcagcctggggtcagtggacgctctgccagaaagggacgctaaggacaaaagcgccaggcttcttgcaaatgagacatcaaggagccagcacgatctatttctggattgccaccctcagtctgagcctgagctcagccaggtcctgtaaagacagcaccatgtcctttctggatggggttgtcatcaccgccctttgtgaccctaggggacacaagggccccttgtttccaaagctggctggaggctgcgtatctccgcaaggaaatgaggttatctcagcttcccctaatacaccctccggcataagaagccccaagcttgggactgggaacctgttccaagcccgtccctcataggcaccatcaattatcaggatgtcttgggctgttcaaatgtgtggtccaggcccagctctggctggggagggctgtgcttcgctgagaggaaatggctcaaaccagatatcgctttgtttgttttccctgtgaagacaagagaccattttcctctcatcttttatttattttttttaagggatcaggcagatatttttaatctctctagcttcctgctctacaggtgtttcctatggagctgctgtggaaaggacagagtccatgatataatctgctttgttctcgagagctccaaaatccttgctttgactggggtcactgccctggatctcctcccagcaaggtgcaatgactgtaccactcccccaaccttgcaccccatctgccccgcagccccatcccgctgcccccaccctccatcaccctctctcactccttactccctaccccaacggtggtatccctactccatctccacagctggctgtggagtccttggggactgggggctgggtggagggatgtggctgctaggcaaccaggtagagctgttcttggcttctcacctgcaagacagctcccccatcaccacaggtgaaaagccttttcctctgacattgaaaacacacaacacttcttcatttaaaaacaaaaagttgcccaaacctaaaacgtttgtggaaaacaccaggtcctctgtgtaccagagaggcctgttacaggaaatcctgttataaagcgaagagacacttattaaaataataccttcctcagtttatttgtttatagcctacgtggatttatgacacctcatggctaccttttagactggatagaaagaatgttcctggaatatttttattatgtggcttcttttaaagccattctaggaggtgggtcttgttggtttgttgttggctgagacagtttctctgtgtagcccgggctgttctggaacttactctgtagatcaggctggccttgaactcagaactcagagacccacctgcctctagccaagtgctggaactgaaggaatacaccaactcgcacagctgaggtgactccttttctttcctttttgtggggatggcagagtcttaccatgtagatcaggctggcctcaaactcacagagatctgcctgcctctgcctcctgagggctcagattaaaggcatgccccagtacacctagccaaatgactcttttttatgatttatttttacttttaactatgtgcacatatgtgtctgtgtgtaggtatgttcgtatgagtgcagatgtcctcagaggctagacaggccattggattgtgcaaagctggagttgcaggaggtcaggagtttctcggtgtagacagtgattcgttttgttgattagggaactaaggttccgaagggtaagaggtctaatagttgttaagggacaggaggagagtttgagcccaggcctttcatcttagctggagttttatagtataattctacttggaattcaaggaagaagaaataataccttttgtatcaatgaattttaagaaaagtatacaagcttgtaaagattaaaaataaattaatatattaagccaaagactgtcacatggaattggtgagggaaatggttgttgcatgatgacagaattcttcccatgagttagtgctggcaaatggacaccgggcttggccaaatgcaagtttcccaccttcattacatgttataatcttctattgaaagtcagatcaaatcgttcatgtggaggcataggtgaacatcagccgccatattcgtttagatgggcgtggcttacccacccatccttcttttatgtcatttgcttggtctctgaacaccccaaggcctctgaccctggggcatgtcatggactcagcctgcgaaggtcaccaccccaggctcagcatgaagctcacgtattctggagatacattttccatctatacagaagtgggactttgctctcagggttaagctgtggaatcagattagcatcttctgtccataacaccaacatatcgagcagacatagaccttgaagagtaagatcttgcatgttgagtcagactcaacaagttttgaagccagtgccactgagccagcaagtagctgaggaactgactcgcggtaactgacactgtggtatcctgtagctcctaggatgcagcgagggctaagagctgatgtcagtgacatagacacaggaagtgctccgactatattggctcccgtcttctttctccttccccaggccgatgactccatggcctctgaggaggatgtagtcttgtttattgccgggaatatgagtttaaactgggttattcaaggctcttaggaaatcagaggcgtggggacgaaaggaaatcacctatgctcctaattctggaaatctgtctcttctgaggggatggtggggttgagtggctgtttgggcttcagactgatcggagaggaggaagaggcagcatttaaaacgtgtctgccgctactgcaagctggcttcagttccagttttcctaaaaccacctccagggcacacatacttacatttagtaccgaaatctcttcgtgcagttattagtaactccgcctcctctcctcttcccctctgggcacgcatgcccattctgtagacacctgggactcggagttgacatccctggcaactccctcccttgggtggtttccagggtttgctccccagccacaccttcctcagaggacagagcttggaaatctcacttcatcaatttcacacacacacacacacacacacacacacacacactattttgtattttaatatatctcagcgactacctttctttcccttaaaaatgtgtgatggacagctttacgatcagctctgagttgctgtcttgttctgtatgccagcacacgtgtgcccagtctcataccttttcacgtgactgggattctcccgacaccctaggttttcccaacgatatttttgttttcccctcaaatcagcttcagtccctagaaacctcatgtacgtctttctgcagaatacctatgttcacgtagctatccagttgcatgtgtttgcacacacatgtacagacgcacaggttttgcagcctgttggcttctctgtgtctgcttctatatgtgtgttataacattttgtggaagttcagagcgttctctttcagtccttttcatggttttgtaatcgcctgttatgtggatacactgcaaaccatttccttttttttttacgggcattctctgtgtcgtcatgcctttactggtgtacacagtgctgccacggtggcctttgtgcccatacacaccgggccttctacaatctgtgaggtagatagaacatgaggccaagccgggaagatttgtataatagagtttaatatatgcttccaaattgctttctcaaagcactgaaacaactcgtatttcctccagcagtatatgagggctcccccatggcctctggctcctccagcttctccttcctgcccgtgtgaaaggcacagcaatctggtgcttccgtagttcacatgtccttacaatgagtgagcctgggcatgtctttaagtagactggcttgttactcttgcatatttgtgtacacacacacaccatgtccttgtcatgccagcttgctttctatggcagatgtcgccccctttctgtcttgttaggagttcttttccttccctttgtgtatagcatttttaccatgcaagttttcagagactggagagaaggctcagtttgtaagcttggctctgcacacttagggacttgagttcaagccctcagagccccacacagaagctgggtatggtggtgtgtgcctaagcccagccctggggaggcagaagcaggagatcccgggagcttcctggatggccagtgtagctgaaccagtgaattccatgttgactaaagaaacttgtctcagaaaagaagaagagtgatggaggaggacccaaacgctgcctgctggccgccgcatgtggacatgccatgagtccatacctgcacacatatgtgtacacaatgcatgcaaaagtgtacataagccacacaccaaaatcagctttaaaaagtgttaatagctataggaagcttctgcttctttaaattgtttttgtgttttgttgggggttttttgttttgtttttgttttttaatagtgtctaggatctccagctccatttaaaaggggaagcatgtcaggttggcgcgcatgtgtcctgcactctgatgctacatccctccttgcagctgagttatctgtttgcctttgaaatcttagaaaccccagagccaagtgtgggaatttagcaaaacttgctgagccctgtggtgcagctcccctcaggccttgctgagtgagtcctgtggtgcagctcccctcaggccctgctgagtcctgtggtgcagctctcctcaggccttgctgagtgagtcctgtggtgcagctctcctcaggccttgctgagtgagttttgtggtgcagctcccctcaggccttgctgagtgagtcctgtggtgcagttcccctcaggccctgctgagccctgtggtgaagctcccctcaggccctgctgagtgagttctgtggtgcagctcccctcaggccctgctgagtgagtcctgtggtgcagctcccctcaggccctgctgagtcctgtggtgcagctcccctcaggccctgctgagtcctgtggtgaagctcccctcaggccctgctgagtgagttctgtggtgcagctcccctcaggccctgctgagtgagttctgtggtgcagcttcccttaggcttcaagcccattctctgaccagatcccatagcagataccagtgtggaataattctgtgttttagctgctgttctcctttccctcctctgtaagtcctccatgtgctccttaacaggaagtctccatttcccagatctcctctatacttttccatttgctgtggtgaactagatatggaatgtccctgaactctctatgaccctgctccaaacatgcccagtattacaaagtcctttccagtagtctcagtcaggtcctcacccttccctggacgtccagcgctctctctagagggcagcactgtgacgtctgctcccctgccttggtttttgcagtctctccttgggtggtaggatccaggtcaagagtctccccttaacatcctgtgcagcttgcaccttttcgggatagcttccaaacacctttgcatttatagaacactcaggctgacagatagtctgcacacaccccctcattcgatttctttttaaaaatgatttattttttttcctatgtgtatgagtgttttgcttgtttatctgtgcaccctgtgcatgcagtacccccagagtccagaagagggcgtcgaattcgtcggcgctagagttatagaggtttgggagccacccatgtgggtgctgggatctgaaccccaggttctctgcaagagcagtttgccctcgatctctgagccacctctccagcaaccccatctgattgttatagcagcccatggtgggaagagctactgtctctcctttatagacaagatcctgaacatcccagaggtgaagtcatctgtctacagtcacgtaaaagtaagattggtgtcgggtgtttgctccacagccctgaccatcaccgccttggcctgtctccgtcctgtctcctcctcattctgtccccttccgggagagtctgaccgctctccccaccttgttgaggtagtctcttatttctgctgggctgaatgccctaagctagctgacctgcaaactcctgggcagtctccttaggttttgcataacaagtgtctgtattcactgagcaacctcactgccctagaggctggaactaaccacactgtgtctgtgctcagggctgacagcaggaaagactctcacagagatgtgttttaaaggaccacttagtttcaatcacacaagcttcttggtcctcaagaacctcttctcaacgggcttttatgtaactctcttgttgcaagtacacacatacacacacagccatgcacacacacacacacaccatgcacacacacacatacacacacacacatacacacacgatgcacacacacacatacacacacagccatgcacacacacacacacacacacaccatgcacacacacacacacaccatgcacattgtccacaccacttctgctcatcttatttaaatatcacatcctggatcaggcttcttcctcatgttttccttatccttcctctctgggggatttttattgccccaataagctgtaagccgaagttaaaatactgatgacagttgaatggacatcttccacagtaccctccgttatgaaaggagctatttcttggcatgccctgagtactttgaggtgcagggcacaggctacagcaagcttgaatgcacgagtctaagacaaggtaggacagagaaggaacagctgcttctggacaaatgtgcaggtgggtgacagccgcctggcacagtttgtgtaagtgcccaggctgttcttggcgggtagggaaacaccctgcgtcagtttgccaggtgaggtctctgtatacctaggctcacagcactcttcagggctgggcagtgttttgccagagttgttaggcaggcttgtgaactcaaacatttatttaaaataattaagttttatccttctgttagcctctgtctctatactggacaattccacatgtgttacttctaagaccaatccaggcccaagtcaactcggtgcacaggagacattttcttcatgcttgcaaacagccagtcggctgtgacttcaaacacttgaaaagccttgccatagggggcttcttctctggaatttccaagggactgtggctgagttataccaggcaattcaatcaaatagccatggtttgtaaagccatccagcagatacatattgactgacggggaaaactcttcagcttcctaccttctgttcactagcctctgatgacaccataagcctggggcccctggcttccagacaagccctcagctgtgcgctgagtctgccagatctgtcattttcagatgagccctttccctgtctgttccctacagggactgtgaaagtcctcatctatgggacacagagttctgtgcacgttccccagagtgacaccggagaacattgctgtccctgacacttagggagtatcacctgttaatagctctctgcctcagtttctctaaccattagtagccaatattcctccttctattgatagactctattgtgttgcataagttctacaaagctgtgtccgtagatgggttggtatttggaaggtgctcagggcactgtagcaactggaattaccagtaggttcttctgcttgtgaactaggtccacaactcagaccgaagatattttaagggactttctcctccccacatcactctttgtgagactctcaacattagggactctgggactcagttccactcacttctgagggcaccccaagcatgggacatcctgagaagtcctgataaaacccctattcctggctgtgctggctccagcccacagggagccaggaggaggctgctgtaacaggagaggcagcagctggctggcaggcaagcctggtccttgggaaatctgttctaatcttagaaggtagtctccaccttctgctgcggcaggcaggacaaatgtcatagacctcagatatacatatgctgtcaccgctgtggtccccagagaagggtttttgtggatgcctctaggtagctgcccagagaactccaggctcacagtgggagggactctccagaaggtcaagtatatttgtgcaatgtgtgtgtgagcacagcacagggctgggaggttttgaacaaattctagaaagagacagacagaatatatacttacttgttgatggaggtgaatgaattgtctaggaatcaggtgcacttgacctttggacattggaacatgaggttaccatctacaagttcacagtcaagaattgtgcaagagagtttaaaaaaaaccaaacttgtgttttaattttgtgtcagactgcacagataactatccttagctgaatgtggtttgagatccttcgttcccacttgtctgcaggctctgctgtcagcttgtagtacgagccaggcttcagctccgggttcctgacccctccaatcccacgctggggctgctggggctgctggggctgctgggactgctgggctgcaggggctctgcgctccatctcggcctttctgagtttgtttccttggtcctgcctctccccaggcctgtcctctttgtcaatgacatacatccttgtctacccagaagcctcttgtctctaccctgcatccccctacataccctcctacatactatccaggcaccagttgggacgtccctagtcaaaccaggagcatctgctctgcatccctgatttcctgctgtcaacattgtccctgacctctttacactggtgatgatagcccctgcgttcccaggctagcccatcccacggtgctcatggtatgtcactcacaggctaggcattcatttctcctgcttctttcagttggtccatctattctctccccagccccttttactcctctctctgagacaaagtctcacgtaggccaggctagctttaaacttgtgatgtagctgaggaagaccctaaacttctcatctgcctccatctcccgagaactaacttcacaggtgtgcatccacacccagtttccttgttgttgttgttgttgttgttgttgttgttgtttggaggagagggatgttcaagacagggtttctctgtgtaacagtcctgaaactcactttgtagaccaggctggccttgaactcacagagatccgcctgcctctgcctctgcctcctaaatgctggaattaaaggtgtgtaccaccgtcccagctgggtggaatctttctaggctccagccactggctctgtctttcagtcggctatcttctctgctttaaagatcttgtggttacatggagcccactcagaccacacagaacacgcccccccccccccgttttaagatcggctgataggcaactttattcctgacagctgcctcatctgtcatttaccctgtgccctaatgtattgacagggtccagggactgggatgtttggtggggccagaggaacaccattctacctctgatgacgactggcctgtttgttgtactttcaccttgcttccagaggtgcggggtgcgtctcccacccagatgtgcacttctcatccaacatgctcactcactctccgcatcctcgaagcctcgtgaccatttagggcacaaggcaaggcaggagtaattctgatgttgcagacccagaagctgaggctccaggagctcatgtgatgtggttggagttacctagaaagaggaagcccaagactatgcttcctcccagtttgcttgccagcaggcctctaagagcgtctgcattaggagaaaggaacgtgcatcaaatagcagaaatggtcaaaaccagggcgatgaatgaagaggatgttgacagtgacatcatgtgtcttttaagtgggaccgccttcaaagggtcacaacatgttgtttccagttgccaatatccccaagatgtagtggaatgtccagtattgtggctggagagatggctcatagattaagagcccagacagctatgaggcctggtgggacacacctttaatcctagcactttgtggcagaagcaagtagatctctgagttcaaggccagcctggtcaatagagccagccaggactaaacagggaaaccccatcttggaaaacaaacaaacaaacagaatgcatacagttcttgcagaggacccaagctgggtgactcaaaactgcctataactccagttatgtgggagcatactctcttttggcccctgcaggtatatgcactcccacacacacatatctttgtacagacacacatgtacacacataatttaaacaataaaacagacatccgcaaaacacaaagaaagaaatacccgctgttacagtgtcagtcttgagattaaacagcagctccttcaacatgtcagcccacagcagcctaagcagggaactgtgctctgtagcccatgttccacacgacagcttcagttagcacgtcccataggatgagagggcatcagaagaatgagcctgtcacccaggaaactcaccataagcattggctgtgactctgtgacacgctcatcacctccttcctgacattgttcctgtgacttttcctccaagcttctggtgtgggctggtgagcccacccagcacggtggcccggcctctcatcacaaccaggccttcaggtagacctctttgagcttcagcgctataaatcttgccctttaatccattgtctaatatacccatatatgggttatataccttaacccaaaaacacttcccattgttaggcgcatggtccctgcccagcttctcaatgctgagtgctgagtacagagccttctgctgcttcttggagcaaactccctctgtccttgaagacctttagggtttggtacctaatttataatcatctcatcagcatctttccccagaagctgactgaaagagactccttaggtacatctgcagccacaaggcatgctgggaacaagatgagcctatccatgggggatgcagaacgcaggggagaaaagtcagcacaaagtcagttttcctccccattaactcctctagctcagttcaatagtctctttaggctgggtgttaaggacttgccattttttaaagtaataatttgactgaggtatgatagacacactatacaattcacatatttaaagtggaccatcagtgctggcaagatgactcggtgggcaaagaaaggcttccaagttggacaacctgagtttaatccctgggacccacttactgggagggaagaagtgactctgatctccggcatgtacagttggcacttgtgtgtgagttcatgcacacacacacacacacacacaattagtaaataaatgatttttttattaatgaacaattagaactggcatgttggctcaagcctcgtgcacttgggaggctgagatagggggatagctgtgagtttggtaccagcctgtgtctcagagtgagatcctgtctcaaaacaggtgagagcacaatgaattggtgtggctgtgtcccatccgactcctccattcactggctggtggacatgaacctggagttttgatgaaagtgctttgatttgacttagagagtcacctatagccggggggtgggggtgggggcgttgagaggtgtttgtggttcctgtgaaatgttcctggggatggaaaatgagttcaaggatggagaaagagtgtcttctgtgtacccaccttggtgataaaagtagcccaatgattgacgtgagatgccacactcctaatggagtacagcatcttagccagctaggcctctgtatcccagagaaagcagaagagataaggcatatctatggacatccctcagcctgtacaggcaagctgctagcattataacctacattcatctatagggagcgattatggaaccctatcaattatgtcaagtactattctaagcatttacatgcataactcattaaattcctgtcagtggctctgtaacatagtactactgtattcgttcccattttacagattgggaacctgagacatgaagtttagaaaccattgttatctcatgtggctggaagttgacctgactaggggcagggaaagagagagagagagagagagagagagagagagagagagagagagagagagagagagagagagagagagagagaggtatatccagaaaaactggggacagttggtccatgcagactctactggaatggtaccggctacctctgccacccagaacctcagcatattaattatgtacagcacaggggtggggggtaaggatgtgtttgtagggaagcagtctccagctgtaaccttcctggggggaggaagctgcggttgtagttttgcatacacaggtcactctcgtgaacactcatattgggccagaagaaggctttgcccaatcctagcctgacccaaatgggaaaggctctaccgactgtgagtcagagaccttgatccctgacatggcgggctcattcagtcaggactccactgacccagccaggactttgcttgccccctagagttaacatctggggccacagagtggaaaatgcagagccagcatttgaactcagtcagtctgaagcctgacctgccccacacacagagcatggtaaaaccgtcattgcgcctgccccacacacagagcatggtaaaaccgtcattgcgcctgccccacacagagcatggtaaaaccgtcattgcgcctgccccacacagagcatggtaaaaccgtcattgcgcctgccccacacacagagcatggtaaaaccgtcattgcgcctgccccacacacagagcatggtaaaaccgtcattgcgccctgcctggaacacggggctcactcccagtcaagtggggctgtgtgggacttagtttcttgccacccatgaagaagggtggtgcggccaccaaacaccaggatattaataacttcacttacaaaacaggatactgctggcctactttctactgctgaattaaccaatacccaggctaaatcaagttttaaagtaggaaaggtttgtttcggtgtgtgatctctgaactcccatggccaagcagtcttgctgctttgggcctgtggtagcagatatgctacatcctagggagagtgtatgtagggtagaggagacttgctcatctcacgacagctaggatgcaaagagagagaagaggtcacaggtcggcatcataatatttcctgctaggacatgtccccaatgacctaataccctaacactagacccaacttctcaaaggtttcacccgctctcaataaaagtctggaaaccaaacctccaacacatgggccttacagacattcaagatgtttcagaagccccatatcctccacacatgaggagcacccagaagctgtcatctgaccctgaatgcgtcgctctcatctattgtccctgtggctttgtaagcctaaatactttctttccctacgcttgtgcctcagctcacagttggctttgattttgtttttccagataatgcatctcccagattacattgctaaacccaagcactgccacggccaccctgttacccaccagtgttacatgggcatccacccaaattctaaccctgcttacattcctaccattacacccgatgacccccacttggaggcctccccaaggctcctgcccttaggcacctaggactttgtcccctggtcaccccactgggatcaggggtctgcaacatcaagtcccagatgaaatgggaagccaagaggcccaccccttacctgtgcctgcggctctgatgatggatggggtattttatgtgggttttccctgggagagagtcgcagaggtcaacttccattttcaggtcctcaaatcctacaagcgggtgtaggttggaaatatttggaactttctcaatcttgtgtgaaataaatatgtgtcgccacgtgcttgtttttcttttcttctctcaagtgatgttcacctctgcctagtgttcccctagagcaggtgttcacagcttaagggcatcacgggttcccacaatgcatttggcaagtctctggtgatgctcaagagagaatggatgaatcacccaccagaagaggtgaggagcaccacactgtctaggtggaacatttgggggttcatgccctcctattcactttaatcagaaagccttctggcatggccctatcctgtcagcagtccacacctgatgtctcccctggagtaacagtggtgatccaccttcgtggataaaggctagctcatggcagaggagaccagcaatgcccaaattttcatcgttgcccttccctgttctgagtttcctctgatttgatccagccttgtggcttcaactgccacttctacctgggtactctgggcttagtttttttctttcatctctaaacccagctgtatattctctccctctccctctccctctcccccttgcctcaggggaggggaagttattcccagagcaggtggacccaggactccgcacctactcaacggagggtagctgtgacttctcggccctttaaatgtttcagaatttattttggctgaaaaaaaaaaccttatgtgtacaggtgctttgcctgnnnnnnnnnnnnnnnnnnnncctctctcctcctctctcttcctctctcttcctctctctccctgtgtctcaactagggtgactatgagacaattcaaactttcatgaccaagaaagtactgttccctccccatctgtcctacccactcttccttccacaaccagccttccttaacccagaagaaaatatgtcaagtgtcccattgtccatcaactgtcccattatcagtaacaaaagtccaggcatttgtttattccactttgtccctcgcatctacacatgttccatcagtctctctcctttctccccatctcctggctgcatgtctggtccacgttgctgtcccctcctccctggaccatgccctgccagcacctgccttgcctctctttcccatctccggtcttccacaagtagctactttatgagtaaccactcactcactccccgcaacagcttgttacactgtatccatgtgcggctggccccaggctaactctgacctatcccttacctctccacctgactctggtgcccagattatccctgctcacttatctctgctgtcccttatcccgtttctgtttatgcatctgtgcaggacacctctcctccctgcctgggatttaactgatcccctgatactccctcctcagagatgtctttccgaactctcataggaaaggtgacccgctttgcctctgtcatgtcccttaacaaatcactttgttgttgatctatctgtatctttgttgttgctttccctccgaggaaaattctggaagtgggcaacccttctgtcttattcactgttatgctcagagcctgagacacaccctccagtgaagggatagggctagtggagactggggtgtgggaagaactggcagcccagaacccaggtggctctcagcgctactcactaaacagaaagttactctgcagccaattttctcctctagaagagggacgagtcacacagtgtgccacccacagctctgaggacagagcttctcacagagagaggcaggtctagtctggtccagcagcctccccatcatcctaggatggcaataagggaaactgtgggataaactgaagcgttgggaacaaagagaacgaaggccccaagactctatactgctccttcccagtcgatagtgaagcagcttggtaatggttggctgctcttcatgggagacagcaccgtcttgagagccttttcccttctggaggaccaaagaagcaagcatcttttactgtctacgaagctctgggatcagtgttctaaagagcaaggaaccttcctactggctgagagcagacgttccttcaccctcaggcggacctctctcgttgccaggcggacccctctcgttgccaggcagacccctctcgttgccactcactatctggcttcccatcatgccttgttgccctaagctgtggcccagagactgttaggcacttggagtttggaacagctgggagggtggagaagcaagggagagccagggaggtagcaggcccgtcctctggcccatacacaaaggttctactatggtcagcggcctccaaattatttactcagcatggcaacagtgtccaggaagttccacacagtctagacataggctcctccgttctcagaaaatccccagttgtgggggaaaaaaaaaaaaaaaaacaccacaggtgatttttctcaggccccgctgaatcagaccttttcttttttttttttttttttaattttttttgagacagggtttccctgtgtagccctggctgtcctagaactcactctgtggaccagactggtcctgaactcagagatctgcttgcctctgcatcctgagtgctgagattaaaggtgtacatcaccactgccgggtgtgtcagactttcttataagtgtgatcttataaaggtagttggcagaaccaggcttacatggtagcaggaagggtatagcaagcaagattcgggcccagaaagatgtggagtttgggcttgtgaccaggtgtgtgtgacccgcaggatgagttaggggtgactataggaacaggtgcccaggtcctgcactggcagatagggctgcatgagagcagaacaaaggacccagactctgatgagcacattctacattttaggcctggtgctaagtactttatgaaccaggaggaaaagggaaaaatatttattcaggaatgctgagcatcttgggaatgcttaaaaggagacatagatactgaagtctttcttaaaaccaagactatatgggctgcaaatgttgcgcggttgctagagtgcttgcctagcatacacaaagccccgggttcaatccccagtgtcagatgaaactgggcgtcttgatgtgtgtgagaaaaggaatctcagcacctggggagaggaagcaaaaagttcagcttcacagtgtgtttgagatcttggttggcataaaatctcctggtgcagggatatggaacaggagctaatgagagtgtggccgctccagcccgggatgggcttgtaagctgttgctcccgtggaaggagctttgtggctggaattgcaatgtaaaggtagaggcagagtctcacatgggctgagccaccagcctgaggaccgggcttgccccataattagccactgaattgcaggcacctctgcaactcaatggctaatcatgattttgatacttaatagcccttgacagttcttaaagcaccttcgcaggatatattacttaacccttgctgggtgtgagggtcagatatcccatggttaatcctatttcgtttcttcagtgtgtcctgtgtgcaagaagcgatcctctttcagtattctgacatttaggagaggaggtatctggagatccgtgggtgtgagaaacctaggcagctgaagacagctcactacctagggggtcttaagaaaacaaacttttttttttttctcacctgacttgcaaggcttccagaagccttatgtcccctgctgcggagcccctcgccaagcacagtccccagacagggaagttcctgtgtgttggatccctctatcgctctatttttaactggaatgtctctccctgcaccaccagccatcggcgcccgggaagctggggtagagtgcacagtcagcagggccgcggcaataaatagtggctggcagaggccatgctggtatgtggcaggaagctagacagggataaaacgatcgcccccgcatctttgccaaggttagctcaattcaccgcactctgtccctcaagcatttctgatgctccagcacagcgagacatgagaccaccattgaggcagccagtgggagtgtcagacaggggccagtcctgagcctatgcagcagcctcctgggatggagcatcagccttccagggccttcccagcaacctgggagaaggctggcatctgaaatagaggtgaatcctttggaaccttccttgaaatcaaccttggtgtttaaactggagtggggatgaacttgagtgacgtagccagcaggaatgaggaacctgactttggccccagagcagcgtctcagtctttcctgactctgcacaaatttcctttccaaccagctatgctggttccacttggttgccaggaggtagcagagaccaaatcaagaaactcggagacacttttagtaccagaagtagggtcatgggtatgtcttgcgcacaagggacatgtggcacagagatgcatgaatacggctggagcaggccgtgatccatctaagaggccatgagactcaggcagagacagtgatggactttcttaaacagcagtcccttccaggacagagggagtgtgataaagttctctgtctatgtctttttaataataataaaatcacaatcacaattgtagtgacaaaaaaagcagaagcctaatagctccaggactgaatacataagaccaagaggaggagccagcaagatggcttagtagataaaggtgattgctgccaaggctgatgatcagagttcagttcctgggatccactggtggaaggaaagacctgactcctgcaagtagcaagcaggatgagaagtggggcgcagggactcaaccagagactcgctccacctctctcattgctccggcaggaagcagtgctggtgtgtctcccattaggccactgaccaaactcagaccaaatggcagcggggggggggggggggggaggaacgtgtagaaaagagcagggttgttattatgactgcctgtgggtccagcctacaggtctgaaagttgttctctgccccccacatacacagagatacacacacattaaatgttaacaacaacaacaacaaaaaaaaccagaaggagctgggtatggtggtacacacctaaaaatcctaacacttgtaaaagaaaaggtaggagggtcataagttcaaggtcagcttactttatagaacaagatcctgagagggacagacacacacacatacagagagagagagacagagacagagacagagacagacagagagagacagagacagagagagaaagagaaagagagagagatccaaaaccaggttattatatagaccatgtgtatataatagacatgaagtgccatttccagggtcacctgacaccctctgtgtcacggtaacaagtggcacatgggatagactacgtccttcaagcatcttggcctgaagcatcagtaagtttattgaccagaactgcaggctggaccacagccagtcacagtgactgcaagcctgctccttgcccctggcctgctgtaataatagagccactcaccagactcagagcagcccaaggagagacaccggcatcaccctgccaaggctcagactgctgtgtcaatgagaggtggagagagtctctggttgagtcccagcggccccctcctcatcctgtctgcttcagcttctcagtcactcactaatgtaataaatggtcactattttgcccaatgcaatcagtaagcagggaaaacaaaatcatggacatttggatgggaaaaatctagaaaaccaaagcctctgtccagttcctacaaagaccctggcttcgatggcatttgcattcccacaccaccctcatttttcagagtcattaagcaggggaagggggtttgcaaactattgttgatatttcccatgtctgggggactctttgcagagtgagagaccttgccctgactgctgacaagcctttgtttgtttgtctctcagaaccccaatacattgtagctacttactaaatgtggggtgactgattagtttgtgtgtatagtatagtagtagtagtagttgttgtttttaagatttatttattttatataagtacactgtagctgtcttcagatacaccagaagaaggcatcagatctcattacagatggttatgagccaccatgtggttgttgggatttgaactcttgacttttggaagaacagtcagttctcttaaccactgagccatctctccagcctagtatttgttgttttttcaatcttgagtatgagagctagttgcaaaatgctgttaaaaatatcttgtcattgaattcctgtcaggaccacaaaacaggtgcctctcatgacaccccaggtgaccttgctgatcaccatttatgtctcctttgtttgccaggaaagaccctcagagaccaactccaatgttgacagctcagcgcagccttcagtggcccagctggctgggcgctttcgggagcatgcagctgtggccagggaggtgagtctggatgcttcgggcatcctcttgggggggggggagttgggggggaaggagctggaggaaggagtagcctcactgaggagaaagagggcaaaatttgccttcctggcttaggcagagtcttgccctccctggagtaaggctcccactgtggtgaggaggggtgacagccagacagtacggnnnnnnnnnnnnnnnnnnnncccaccccaccccccacatcagatccggaactgagaatttcgaaggaatcacattcaataagaaaccaggaatgtggaaaaaaaagggacccaggactaggagattctagaagaatcctgctgaagaagaaaatgtttaataatttaaaaagtgttatgctttcggacaggtgtactggattgtctcgtgtagtgggtggcttccattagaagtgagctgcggggagcagctgcacactagtgttagaggaagaaccaagacttcaaggtcagctaggaatgggtggtgcatagctttaatcccaacacttaggaggcagaggcaggaggatctctgattagaggcccggtctacagaatgagttccaggatagccagggctacacagagaatgaatcctgtctcaaaaaacaaaacaaaacaaaacaaaataggggggtgggggagagagtcaaatagcatctgggaaagtcaaaggcagcaagagttcccgaggtgggggaggggtttgcctggatcccacgggagcccagctgccttgttcttttaggtatgtgattttgcactggtaaaagtggcccatgatttctaaagaggaatgcactaaagggcaaaggagatggcattgatctgagggtctagttctgcttctcagcaaaaaggcaaaatgcggatgtcatcttgcaagcttggctcagattggagggggtgagggtcaagtacaagagaaccttattgctgaatagaaaggcagaggggctcaagggttgcggatgcgcagcaggaggacagtcccttagacatgcaggcaggcccactgcccattctttcctccccagacatccctaaccattcctaacactggtttccaccttcctcctcctccctattgcctgattcactgcctctctttttctctctgtgtcgtctgtcactctccctctagacaccagccagtaagccaacaagaaggaaaccaccttgctccctccccctgtttccccccaaggtagagctgggccagaacggtgaggaggtaagtgccgccctgggagcacggctgctgcccgctgccctgggcatgcgcacggctgctgcccgccgccctgggcacgcgcacggctgctgccggtgggttttcatcctccttgtaacaggaaagagctgcaagcatcacagtttcaggccttgacgttgccacaagggtggcttcacctccggtacaggaaagagtctctcttaatacttcctgcgtctttcactgtggaggctagctctcccttaagcctccttaagggatcagtcaagtaccagagccatttttcagtccccaagtctaagggtggtagaggaggtgtagaagggtccttggggagagaagccatgtcctcagaggcagagagctacagtgctggagaagttcatggcctctccatagcctttgtaaaggctggccattgttctgcatcactggaagaaacccagagcacacaggaggcctcctgcctctcggatataaatagccagtgctgccgactaatgaaggctctggtgttatagatcatagccagtaatagagccccagccttcatgctgcccagtcttatttatctaattgtagctgttagagtagctgctgcaggccccaacccagcagcccgggaaccttcgctgtggtcacggtcacggtcctgccagaaaccaatttgcatgttgtcttcaggccgcagaggccaagcccaaaatagagcaaacaagccaaacagctcagttcccaagtcccaccttagcccctcttcttcccttcccttcttttctgggaccagcatcctcataaaaggcacggagtacccctgtgaacttgggacattttatcccctacaaagtgaaacgtttgatgtagatgaatggttttcgagccttttgtcagccccagggctcacaagcagaagtgcatcaaaaagcaaagaacccgggccagcaagagggcccagcaggtgaaggtgcttacgtgccatcaagtccattcattggcctgaatccgagttctgtctttagtaaccacatggtaaaaggaaagaacccactctcaaagggtgttctctgacctctacacgcatgcagtgacacacgtgcaacacacacatacacacacacacaataaacaaacaaattaatactagataagtgtgattaaagagcagtaaacttggtacttagatatggctcagtggttaagagcactggctgctgtttcagaggacctgggttctgttattccagtgccaaggaatctgatgtctttgtttaacctctctggacatcggtgcacagagttacatgcaggcaaagcacctgtacacataaggttttttttttcagccaaaataaattctgaaacatttaaagggccgagaagtcacagctacccccccgttgagtaggtgcggagtcctgggtccacctgctctgggaataacttcccctccactgaacaagggtagtcttgtgaggtgagaaatcccaggggctgagtttaagaaactctgtgtttttgttgggtccccaccagtgctgtcatcatggtgctgtgacttcatggggttcccagacaaagctatgaccagcaacttctctttactgagggtcaacttctcctagcagctcttccctgctgagcttggcacctctgctgtggtataatgggctgtggctgcggccatctgagctgtcccctgataacctaggcttgccccaagaggactcattgctccacactaataccttatttgtaaaatgagaacgagaacatcagtggagggggcgggggatgcagaagcgatgctcatgggaacgaaaacagatgcagtgggtcgggtttgtagtgactagagtatacaacttcatttcagggactttatgagaatagaaatttagagctttccttgaaaagttaaactcgaggaatggccaagggatagaatggttttagattgaaaatccattctggagtgagatgctgtgtgttcatgacaacattgcccccagggttagtcactttctttttgccttgaaatttacagagtagggcatcacgaaccacaacagtgatgccagcacttcggaggattgctaattcaagaccagactggtctacatagcaagctccaggccaggatgtcacaatgagacctctgtcagaaagagggtgcagttcacctgcctggcaggactaaatggaggtgttacaagcctttgtagtgtgtgcagcctacaggagcacctacatcccacaggcacagacgttgctcacacatgggggtgggtaggatggctgggactcctatatattctgtgtctgagatgtggagtcagccccagaatttcacctacagactacaggcaaaatgacaagttaccttacctgggaaaaccaaatgacagggtgttgaaaggacatgaacaccactccatccaaaactatcagatcaacaacttatatcataatacattattgggatggtatagcaatacacataaacataaaaatgtatgaacaccacgttggttcatctccactgactgacttagtcccaccactggcctgatgcctgtgattaaattatcaactaaatgttgccatctgctgtccatggtgtgaattacattggcagttgtacggggcttcattctgttttgtagtcaaatcagtacagggtccgcagtccgacatctgctaggtctctagtactgaaattatattttcacctaaagtgaactttggtagcaaaatttttgctgtagtttctaaagctgaaacttccaaaacaccattcccttgtgaagaccagaaattaagaacctcccagttgggacaggaggatcttgacactcactagaaacaaaagggtccatgactgactgcctcagcaaagtgtctgacgagggagactcacagcgataatggcaacccagagcttgaagggaaggcctcagcatcctttgccttagccaccacatcctgacaggacaggcatccatctgcccaccaaaagcagagtcagaaggaggcaggtctctgagtcccagtcatccactgccccactgcagcatactctccctcgacactgggagtcgacaccagctgagtcggtctctcttcttctacaactataatataaccagatgtctcagaacattacccagagatcagcagtacttctcttcttatggtttccatacactcatatatggagacaggggtgggttggagtggcccaaactattggagaaacccctcccgtgcttggccttgtctatcaacctgaaaggcgttttccgtttcttcaccctcccttaatcattacgtggctgctgtccttcttgcattgtagtgggaatttagaataaaaccaggcaccaatctggaattatacatatttataaatatgtaatctggaagcaggaatgattcctggtgtgcactgatcacaaaagtaattagcagagtatacatagtagagagagcagcctctgactgttagttatgggaagaaactaaatcaccttcatcctcatataactaacacaatccgtggtgggattggtagatacttaacacacacatcggcctgtttatatgaatattcagtgttgggggaaattctggcatatgaaccacgctgttggtggaattttccaaagtattaatccaatggaggggctttaataatacctctgcctgatttcattcccagcctgtgatttattgctttgtttgtgaccagagagtggatggccattttgcctttggtctgtgaaattccctccaattgttaagttgcctcgcagaaggccatgaggtgaaggccttgatccccacagacgtagtttttcctcctaatgacaatgaagtcattcttcctgggatgggaggtttcctgtgatatgaatgtctgccccgacttctcagctcaaactcgtggtcttccttgtgatgaggtgagggggtgggaacagcaggcctgtctcctctaggcctgaggtaagtggtacggcaccaaagcggtgatggcttaatagcccaccctctcttctccctcctccctccgccctcctccctctagctcacttggtcattttggtctgtttgtcctgtagaaatcaccatccggcgccagccacccacctaaaatcaaggtgaagagctcacccctgatcgagaagcttcaggtatgtgcagaacacatcctgcttcccacacactcccgtgacatgacatgacgtgacgtgacgtgacgtgacatgtatggtgctgccccttccttcctgttatcacatggtacttaaaaacaaaaacacaaacaaaaagtatggcctgggcttaacagtgctgtttctcagcttgtgagtnnnnnnnnnnnnnnnnnnnnnnnnnnnnnnnnnnnnntatacatccagttctgtccttcagagattctcaaggccatcagtcttgcctgggggcggggtggggggatattgtgatttggggtatttattaaccaagcaatgcatgagagtaaccagaaatcatctatagaagattgtggaggtcggactaaaagttgggacaaatagaggaccagaaatggtatttagatttgctaaagctcatacggcagctattaagagaaagatcctgtatttggagttgggtatgtgggattttctggtgctccatctgcctctcttgcctagtcccctctctgggaggtcctccgtctgacccgcccagttatatcagaaagattctattgtgtgggattggaactacagagagcagaagcaagatgtgtgcccctagagggcgctaaaactctgtggcctggtgatgtcgagtgcttgcttagtgtgcagataggccaattcagttcaaagttctattcctagcacctcaaaaatcagcatggtggaacaagcctgtgatcccagcaccctaaaggtagcaaaggaggctcagaagttcagggtcattctaggctaattagtgagttgaaggccaacctgagctccgtgacaccctgtctgggctgttcgcacgtaatccctccataaccttcctgctctaacatctgtaaggttgatttggggcctgccacctgttccccagccaaatctgtagatttcttaggctttagttacctttgagtaactctccctttggtcttcggtgtccctttatatccatgttcatctggtgtcacctgtatcgtggtgactggagggcagacaccctgtagactgccgtgtccatcagtgtgctgtctctaaagacagaactctccctggaggctcgagagacaaggaggcctgccatgagcctcaggtgatttaagccaccttcctgatgtgccaggagaccaacactgaccgtgtagagtctctgcagaggcaatagctgcacatggcagatactatgagcagcaaatgctcctggctaatggggggatgacatgggtgccagatactgcaagagcctgagaggtgttgggtggtggcgacactcctctgttgtcaccactaccaccatcatcatcatcagttagggtctcactatggagccccagctggcctagacttcccagactgacctcaaacccatggagatctgcctgcctctgccttctgagtgctgggattaaaggcttgcagcactatgccaggccagggcagttccattcttgttgggcgtgtctaatagtgaatccacttcatcctgatctgagcatccaaggtgtcgggtaggccatgcttctggaacagccacaatgtaagtgacagcggatgattggttggggacatgaacacaagcttgctgatagctaccctcaaccagctgtgaagccagtgaacaaacacagcagaagccctcatcttctcccctttcttggcaggccaacttagcctttgacccggcagctcttctgcctggggcttcacccaaaagtcccggactcaaggccatcgtatcaccatttcacagtcccccttccacacccagtagccccggcatccgatcccacccaagtgaggcagaagaggtgcctgtgagctttgaccagcccccggaaggaactcacctgccctcttacaataaggtaagttactgctcgcttggactgtggtgtgctgaggaaacttttaagtgttcaaactttcgactattgtaaaaaagacatcacctacagggtttgggggccatcatcacagaacatgaagctcactattggtcagctgttagctgcaggggtctgctgtctcacaatgccagctgcagggatgcgcttgaaaggaaataaaacttgagacatgttattcatgtaatttatgtcaaatagcccaaagagttgtttgtgagctttgaaacctggggctaagaacatagcagaacaggccaggacatgcccgggcaggcccgtcattacatgtcctgactggcctagtgcctccctatctcccgcccttctgacagtctgttgatgtttaaatggaccaatcatgtaaaacctcgccaattcctcccccagccccaccccttttctataaaaacccctagcttccaagcctcggggtcgaaaccactgtctcctgcgtgagatacgtttcgaaccggagctccgccattatggctccaccatgtggtcaacacctctgtctcctgtgggagatatgtgtcagcccggagctctgtcattaaactacctcatgcttttacatcaagatggtcgtctgttcgtgattcttgggtgctccgaacagaaattgagtgggggtttccccactaggttctttcacgctctctccaagctcactctccttgtctttcacacgggtcctaaggacccaaactcagacgctcactcttcctctgcaaacgctttgctcactgaactgcctccgcacattgttaacacaagcaaagcattgccatcttcctgagacaaaaatctgcagctcaccaagtcattctacaaacctccaatgagattctcaaccttcctaagactgcgaccctttaagacagtttctcatggtgtggtgaccataaattattttgttgctactttataactataaatttgctactgttaggaatcataaggtaaatatcggctatgtgatccctgtgggggtcgtgactcagaggttgagaaccactgctctagattctgatttgtaatgaacagcaaagaactttacaccctcctaggaaattaaaggagcctgtagtgttttgttttttttcccagaatacatagccctccacctggccttttaaattttttttatatttttttattaggtattttcctcatttacatttccaatgctatcccaaaaagtcccccataccctcccccccactcccctacccatccactcccactttttggccctggcgttcccctgtactggggcatataaagtttgcaagtccaatgggcctctctttccgttgatggccaactaggccatcttttgatacatatgcagctagagtcaagagctccggggtacctttttaatttttaagataatgttccttcatatcttcttccaggtgcggactagaggctcaataaaaagacgtcctccctcgcggcgattccgaaggtctcagtcggactgtggggattttagagattacagggctgtggagccatctcaggaaaacggtgccagggaagagaatggggatgacgtgtttgctagcaagagcaaggaccccgggtcccctcaactcaaccaggaggctatggcagacggggtggagggaactccgtggtctgcagaaaagccacggagaaggaacacgtgtaacagcacagagaagccagaggagctggtcaggaccccagaggaggcgaatgctggagagaaggttggacagaatccagacacagctagtcagggtcatccagaggtccaggcgccatcgcaaaccggcagcccagaggctgagaatgggtgcggaagcccacgggaagagacaaccccgggagagcatacagacactgggaaggccactgaagggacagcctctgaggagagggtagcagatgaagataggctcggacagaaaagcccagacgcaaatatgcctgaggaggagggagtggtcagggagaaagccccacaaacctcttctggaaaagcagaaggtactactatcgcagagccggatacaaagcaaaaggaggaggcgcctctggagccaagctgtagcccaggggctgaccatgctgcgggagagatcaccagtgagatccagaatgagaaagcagtctccatggtaggtggccctgatggtttatgctgtatcaggaccagagctgcccctatcagctctgtatgcagaagcaaagtcaacagcgccctctacccaccacccaccgccactccccacccagtgctgactgaggagagactgccctgtctctgttgtgttctggtctgcttctagctgactgggtcagcttctgggtatgcatgcagtgagccaggattggccatatctcagtgactaacgttggcaatgtgaactgaaggggaacagggtgctgctgctgttggggtcctgaagagaaagagtctgtgtgtagagagaagggtaggacatcagggacacttccaagcccaggaggaggctctgcgtgatatccacccagacccaagcaatgtctcaggttgcctctgactagggaggtggaacacttcctggccttctgtcttaactgctcgctacctgtctgtttcaactagctcccagaaattccccttaaattcacctgtctgccttaggagaatcctggggatgccttggaagttctgcaaggacaactcagtgccctccccagcctgttcctgacaatttccttggccttgtcatctttatgttctcctttcccgtgttggtaggtcactcagccactatgtgcgtcctactacagtagcctcttgtctgccttcctcccatccttgatagggttcattctttacacagtaaccaaagggtgggtagactggtgggtagttggctggctgggtctactcttggcaaaatgtctcacctctcttattagggtttccagacacattgccacaggcttagtggcttaaaacaataccaatgagctgggtgcgcagcgcctgcctgtcgtcccagcactcaatgtgaaatggaaggtcaatgtaaattcaaggctagcctgggctactagtgagtccaaacaaaaaggcatagtgagcccgtgaaaaagttgaagaccctgcctataaataaatacataaataagcacataagtataaatataaataaatagataatagatagatagatagatagatagatagatacatagatagatagatagatagatagatagatagatagatacatagatagatagatagatagatagatagatagatagatagatagatagatagataaaggaaatgtactttctcacagtcctgaacatcagaattaggactccaaagttaagctgttgataacctgagcccctccagagggctaaaggaaaacctgtctgtgttctgttagttgctgtctgcacctctgtgatcttcccttgacctcccctcccccagcttctggtcggggatcataaacgtttggcagtcagttgcttgaggatgcctcctccgatctttgtcaccatctctgtgtgacctctgctgtatctgtgtctcagatttcctcctctcttctctcttataagccacctgtcctcagatgcaggatgcgccttaaagccatgtgacctcttcttgaaatcctgcaccacatctgttgcactctgcttttcaaataagatcttggtgaaggacacacactctcttccctggccctccccggagctgggctctggccatctgctgtctgcttcctgcaacacaccagattccttcctcactcagagcttcctgcctttccagcccctcccagtgagaacgctcttctttctgattctcctgtgactacttccatccagcctatccttcaggtctcaggtgacagcgacctcttccctaaagcctgccttgtgacatctcaggcaaaggaatctgctcccaccccccagttattctctcccataattccactgcatcattctcctggggtttttgatgtttgtttagatttatttatttcattttatgtgtatgcatgttttgcttgcgtatgtgtgtatgtgtagtatacgcatgcgtagttcctttgcgcatgcgtagtgcctttggcggccaaagagggcgtcggaacctctagaaccggagttagggatggttgtgagccacagtgcggaaaccaaacccagtgaccctaaccactgaacaatctctccaactcctcccctgcttatttctattgtctcttgtgctattcctctactataatcccaaaacttacagtagaatctggactatggtaggtctttaaaaatacgtgtagagagaatgagtggtttttaatcacctcattagtttcctgagacaaggtcttagtttatagctcagggtgtcctagagctcactgttagtccaagaggccttgaactcaaggaaatccttctgccttagcctcttgggtactgggatgggtgtgtgccactatgtcatctgagtggatggatttttaaaagggagtgagaaccccttggcctaatgtaaatggctcataatggtagaacagcaggaacaggaggggctgcctggctctgaggctccccgcaggcctcatggcctactagcatacaaaggaaatccttttccaactgagccgtccttgaattagggttagtcactaggtttagaatcttctggaacctggaaattccactaaatccccagaagattacaccaaattcccaaacctttagtcctcttggaatccaaggaatgctccaccagtgaccccccaggccatttcctgggctgggaggttcctgcctttttgacagcatctcctggtcctcaggggtcagagtctcctgggctgctgagttggcaggactttgttgtttcaggagagtcttaggtaaagggtggcttcccaaagaaaatccaggcaagtgctatggggcaggctctctggtcctctctcctgttttatactctgtattcctaacctagagaaccctggccaggggacaaaacacctcaaccgtactctccccgcaaatagcagctcagacagagaaagaagagcttcacaatccctgttaccccaccttcctacnnnnnnnnnnnnnnnnnnnnnnnnnnnnnnnnnnnnnnnnnnnnnnnnnnnnnnnnnnnnnnnnnnnnnnnnnnnnnnnnnnnnnnnnnnnnnnnnnnnnnnnnnnnnnnnnnnnnnnnnnnnnnnnnnnnnnnnnnnnnnnnnnnnnnnnnnnncacccccccaacccccactcaccactgagaggcaaaacttttatactatttagcccaccctcctggttttagaaaggaaggcatgtaggtctggagattgtccaaggacaccgagctccaacagtgctaacctattaggcccctgttcatcagagtacagtttaaggagcacctctgccggggtgaattatctgtctaatctgtgagggcttctgcttcctatcttctttggtccctctccagcctgatccaagattaaagtcagaatgcctcagactctagggcaaaaggattccccagaggcagaatcttggcacatccctagggacccaagcctatcctgggtctttccagaatacctggctggcagaaacaggcagtaaacagtagtaagtggtttcccattcccaatctaatgcccattttgggctttgattgatggaaatcaattgatcaaataaatgaattccagttgaattcattcaagtcagcactgattagacatctttatggatgcgggacagactgggggttcaaagtaggggtcataggacttgggactctgttgataaggaaacacttgccaggtgccgtgacacacacataatcccagcacttggtaggttgaggcaggcagaagagaggttccaggccatcctcagtcacatagcctgctgaaggccagccagggttacaggagcacacatccacaaaaggcaatagggatgtcttcaattcatcccacgctttaatgtgccaaccctaaatatgggtggcctcccttactgcctaacttgattgcttctcctagtcagtttttctttctctgttggctgatgtttttttcttccacagcaggagatacacatcctgagagcctgtgtaactctgagagcctgtgtttatctgagagttcgttcccctgtctgggcttactgcttcctctttctttccctcaggaaatgcggtcactaaatcttgccattggggccccttatcccttctggttcatacgggggccccctccctacactccacccacaccccatccacacaactgtcctttcccaagatctctttcttttctcccttccttggccaactgccatgccagctctgggcaactccgtcttcctggtgtctgtaatcacagctcactccctctgaatccctggtcctcagatccaccctattgataatcatcaaatttctcctccttgcatcccactttgctagccactgagctaccccacaaacgtgatactgcttagaagtaactcagttcacacttctgggtttaggctccctggacccagctatgactattgcctgggggccctctcaccatgcctccatcgtctccttcctgagcatccatgacaaccccagccaaaaccactacaaactcaagaacttgcttgtgtccagtctcatccactaggacggaccacatcacaagccctgagcacatttgtaaatgtgtttacttatcatctaaacaaataaacaaacacagaaggacccaacagtgccatttttgatgagcattggacaaacagctcctttgttgtgatttctgtctacgtgtacagtctactacttcttatttgcagtgctggggaccaaacccagacctcaggcatgcatggccaggtctctacctctgcatcacaaaagacagtcttttctttcatcctctctctgttgccaaaaatcttgactagtaattcaagaagaatgacgttgaatggaaagagaagggcgaagctaggcttcaaagaaggagggtgtttagtagccggagtctgaagctctggtccctgggatggagtcccaactggaccacttgctagttgtgtaacccaggaaagtcatttctgtctctgtaccataattgtttcaactgtaacatagagttaatacaaccacctaactcccatgggcgaggtgaagattaaatggtgtgtgaataagtacatcgggaatattgtctgctggctcactcctacctcatgaattttttccttgtctctcactctgaaggagctctgctgaacgctgtgtctttcttccccgttcacaggatgacatccccatcgaggatacccgaatgtgatgaagggctcagggtaccagtgatggggccactggagacatctccttggaaacagcagcagtaacagcagcagcagcagtgcatgaagccactgcagaagcagaatacaccgagcatctggagacagcccaggatgcagggtggatggtcccccgtaggctacaccaaccgtctcctcactggagatgagagctgaggacagtagagttttatcaacttgagtttgtgtcacctgacgcacgactcaaagttaaatatatttaaagcaatttggtgtggtgtctgctccacgaccttcctgttgatccccaagtcttcctgcagccaacctcccaactaggctcttgttgaacttgtgtaaagttacggcctttttctatcgttctaatgtttttatggttctcagacgtaacttacaactaattttaggtagataaagaaggtagtcttgtggagaataagattccctaagttaccgagacctgaaaacataccaaagccctcacgacgaccgttctgcttgctccagatgggaatcagctgaccagtttcaaaaactcaaagagatatttattaaaacatttaaagtcgtgttcctgcctgctccaaggacaggaacttttccctgtcccacacagcctggctgatgagaacaaggggaggtgattgatccatctcatcccatccaaaggagaggcaggattcatcccctccacccctcaaggtgccaccatatgcctgccttgctctgagcatgggttgtactctcctggaaggttacacttgaacaggaaactggccggcctctgggagggacgttcagtgtccgcagtacagcttaccttctgagagcgtctctcttcgcttctctatgaagttttgtttgtttgcttttgtttttgttttttcaaatctcaccatgtagacttatatgtagcccaggctggttttgaattagtgatccccctgcctctgcctctagattgtgggtatgcatcactgtgcctggttctcagtaagcatttctcaactccaagttcttctcccagactcaggaggcatgagttagggtctccagcctgttttcatcaggaactcctgctcagtatcctgtccggggataaaacagggtttgcaggaatatgggtcggtctgatatccattcctctgatcaccctcccctccatgaactcctgctgaagaaatgttaacataaataaatgatgaatcttc

SEQ ID NO: 290 - DNA, 2787 bp, Mus Musculus
aagaggcttttctaaaggaactcatctagaaagcatcggactagaatctcaccctctgcctgcttctgaagcagaggtcttgcccctatatgctgctgagttcaatgaacagaggctgccctgacttcatggtttacaaggtaagatttagaaggcctgtgacgtcaagatctatagaccaactgtgatgagaagcagtcggggcagcctttgcaatgtggggcccccagctggggcagtcccgcagccgagtgcagccaggcgcgcgccgccgcccactcgccctgtgcccgctacagccccgaaagtgacccgggctgggagccgaggggacagcggggatcgtgggctcttaacccgagagagcgggcgtatccgcagccggaggaagactacctggaggacatggaggaaagaccctcagagaccaactccaatgttgacagctcagcgcagccttcagtggcccagctggctgggcgctttcgggagcatgcagctgtggccagggagaaatcaccatccggcgccagccacccacctaaaatcaaggtgaagagctcacccctgatcgagaagcttcaggccaacttagcctttgacccggcagctcttctgcctggggcttcacccaaaagtcccggactcaaggccatcgtatcaccatttcacagtcccccttccacacccagtagccccggcatccgatcccacccaagtgaggcagaagaggtgcctgtgagctttgaccagcccccggaaggaactcacctgccctcttacaataaggtgcggactagaggctcaataaaaagacgtcctccctcgcggcgattccgaaggtctcagtcggactgtggggattttagagattacagggctgtggagccatctcaggaaaacggtgccagggaagagaatggggatgacgtgtttgctagcaagagcaaggaccccgggtcccctcaactcaaccaggaggctatggcagacggggtggagggaactccgtggtctgcagaaaagccacggagaaggaacacgtgtaacagcacagagaagccagaggagctggtcaggaccccagaggaggcgaatgctggagagaaggttggacagaatccagacacagctagtcagggtcatccagaggtccaggcgccatcgcaaaccggcagcccagaggctgagaatgggtgcggaagcccacgggaagagacaaccccgggagagcatacagacactgggaaggccactgaagggacagcctctgaggagagggtagcagatgaagataggctcggacagaaaagcccagacgcaaatatgcctgaggaggagggagtggtcagggagaaagccccacaaacctcttctggaaaagcagaaggtactactatcgcagagccggatacaaagcaaaaggaggaggcgcctctggagccaagctgtagcccaggggctgaccatgctgcgggagagatcaccagtgagatccagaatgagaaagcagtctccatggatgacatccccatcgaggatacccgaatgtgatgaagggctcagggtaccagtgatggggccactggagacatctccttggaaacagcagcagtaacagcagcagcagcagtgcatgaagccactgcagaagcagaatacaccgagcatctggagacagcccaggatgcagggtggatggtcccccgtaggctacaccaaccgtctcctcactggagatgagagctgaggacagtagagttttatcaacttgagtttgtgtcacctgacgcacgactcaaagttaaatatatttaaagcaatttggtgtggtgtctgctccacgaccttcctgttgatccccaagtcttcctgcagccaacctcccaactaggctcttgttgaacttgtgtaaagttacggcctttttctatcgttctaatgtttttatggttctcagacgtaacttacaactaattttaggtagataaagaaggtagtcttgtggagaataagattccctaagttaccgagacctgaaaacataccaaagccctcacgacgaccgttctgcttgctccagatgggaatcagctgaccagtttcaaaaactcaaagagatatttattaaaacatttaaagtcgtgttcctgcctgctccaaggacaggaacttttccctgtcccacacagcctggctgatgagaacaaggggaggtgattgatccatctcatcccatccaaaggagaggcaggattcatcccctccacccctcaaggtgccaccatatgcctgccttgctctgagcatgggttgtactctcctggaaggttacacttgaacaggaaactggccggcctctgggagggacgttcagtgtccgcagtacagcttaccttctgagagcgtctctcttcgcttctctatgaagttttgtttgtttgcttttgtttttgttttttcaaatctcaccatgtagacttatatgtagcccaggctggttttgaattagtgatccccctgcctctgcctctagattgtgggtatgcatcactgtgcctggttctcagtaagcatttctcaactccaagttcttctcccagactcaggaggcatgagttagggtctccagcctgttttcatcaggaactcctgctcagtatcctgtccggggataaaacagggtttgcaggaatatgggtcggtctgatatccattcctctgatcaccctcccctccatgaactcctgctgaagaaatgttaacataaataaatgatgaatcttc

SEQ ID NO: 291 - protein, 382 aa, Mus Musculus
MEERPSETNSNVDSSAQPSVAQLAGRFREHAAVAREKSPSGASHPPKIKVKSSPLIEKLQANLAFDPAALLPGASPKSPGLKAIVSPFHSPPSTPSSPGIRSHPSEAEEVPVSFDQPPEGTHLPSYNKVRTRGSIKRRPPSRRFRRSQSDCGDFRDYRAVEPSQENGAREENGDDVFASKSKDPGSPQLNQEAMADGVEGTPWSAEKPRRRNTCNSTEKPEELVRTPEEANAGEKVGQNPDTASQGHPEVQAPSQTGSPEAENGCGSPREETTPGEHTDTGKATEGTASEERVADEDRLGQKSPDANMPEEEGVVREKAPQTSSGKAEGTTIAEPDTKQKEEAPLEPSCSPGADHAAGEITSEIQNEKAVSMDDIPIEDTRM

SEQ ID NO: 292 - DNA, 2877 bp, Mus Musculus
aagaggcttttctaaaggaactcatctagaaagcatcggactagaatctcaccctctgcctgcttctgaagcagaggtcttgcccctatatgctgctgagttcaatgaacagaggctgccctgacttcatggtttacaaggtaagatttagaaggcctgtgacgtcaagatctatagaccaactgtgatgagaagcagtcggggcagcctttgcaatgtggggcccccagctggggcagtcccgcagccgagtgcagccaggcgcgcgccgccgcccactcgccctgtgcccgctacagccccgaaagtgacccgggctgggagccgaggggacagcggggatcgtgggctcttaacccgagagagcgggcgtatccgcagccggaggaagactacctggaggacatggaggaaagaccctcagagaccaactccaatgttgacagctcagcgcagccttcagtggcccagctggctgggcgctttcgggagcatgcagctgtggccagggagacaccagccagtaagccaacaagaaggaaaccaccttgctccctccccctgtttccccccaaggtagagctgggccagaacggtgaggagaaatcaccatccggcgccagccacccacctaaaatcaaggtgaagagctcacccctgatcgagaagcttcaggccaacttagcctttgacccggcagctcttctgcctggggcttcacccaaaagtcccggactcaaggccatcgtatcaccatttcacagtcccccttccacacccagtagccccggcatccgatcccacccaagtgaggcagaagaggtgcctgtgagctttgaccagcccccggaaggaactcacctgccctcttacaataaggtgcggactagaggctcaataaaaagacgtcctccctcgcggcgattccgaaggtctcagtcggactgtggggattttagagattacagggctgtggagccatctcaggaaaacggtgccagggaagagaatggggatgacgtgtttgctagcaagagcaaggaccccgggtcccctcaactcaaccaggaggctatggcagacggggtggagggaactccgtggtctgcagaaaagccacggagaaggaacacgtgtaacagcacagagaagccagaggagctggtcaggaccccagaggaggcgaatgctggagagaaggttggacagaatccagacacagctagtcagggtcatccagaggtccaggcgccatcgcaaaccggcagcccagaggctgagaatgggtgcggaagcccacgggaagagacaaccccgggagagcatacagacactgggaaggccactgaagggacagcctctgaggagagggtagcagatgaagataggctcggacagaaaagcccagacgcaaatatgcctgaggaggagggagtggtcagggagaaagccccacaaacctcttctggaaaagcagaaggtactactatcgcagagccggatacaaagcaaaaggaggaggcgcctctggagccaagctgtagcccaggggctgaccatgctgcgggagagatcaccagtgagatccagaatgagaaagcagtctccatggatgacatccccatcgaggatacccgaatgtgatgaagggctcagggtaccagtgatggggccactggagacatctccttggaaacagcagcagtaacagcagcagcagcagtgcatgaagccactgcagaagcagaatacaccgagcatctggagacagcccaggatgcagggtggatggtcccccgtaggctacaccaaccgtctcctcactggagatgagagctgaggacagtagagttttatcaacttgagtttgtgtcacctgacgcacgactcaaagttaaatatatttaaagcaatttggtgtggtgtctgctccacgaccttcctgttgatccccaagtcttcctgcagccaacctcccaactaggctcttgttgaacttgtgtaaagttacggcctttttctatcgttctaatgtttttatggttctcagacgtaacttacaactaattttaggtagataaagaaggtagtcttgtggagaataagattccctaagttaccgagacctgaaaacataccaaagccctcacgacgaccgttctgcttgctccagatgggaatcagctgaccagtttcaaaaactcaaagagatatttattaaaacatttaaagtcgtgttcctgcctgctccaaggacaggaacttttccctgtcccacacagcctggctgatgagaacaaggggaggtgattgatccatctcatcccatccaaaggagaggcaggattcatcccctccacccctcaaggtgccaccatatgcctgccttgctctgagcatgggttgtactctcctggaaggttacacttgaacaggaaactggccggcctctgggagggacgttcagtgtccgcagtacagcttaccttctgagagcgtctctcttcgcttctctatgaagttttgtttgtttgcttttgtttttgttttttcaaatctcaccatgtagacttatatgtagcccaggctggttttgaattagtgatccccctgcctctgcctctagattgtgggtatgcatcactgtgcctggttctcagtaagcatttctcaactccaagttcttctcccagactcaggaggcatgagttagggtctccagcctgttttcatcaggaactcctgctcagtatcctgtccggggataaaacagggtttgcaggaatatgggtcggtctgatatccattcctctgatcaccctcccctccatgaactcctgctgaagaaatgttaacataaataaatgatgaatcttc

SEQ ID NO: 293 - protein, 412 aa, Mus Musculus
MEERPSETNSNVDSSAQPSVAQLAGRFREHAAVARETPASKPTRRKPPCSLPLFPPKVELGQNGEEKSPSGASHPPKIKVKSSPLIEKLQANLAFDPAALLPGASPKSPGLKAIVSPFHSPPSTPSSPGIRSHPSEAEEVPVSFDQPPEGTHLPSYNKVRTRGSIKRRPPSRRFRRSQSDCGDFRDYRAVEPSQENGAREENGDDVFASKSKDPGSPQLNQEAMADGVEGTPWSAEKPRRRNTCNSTEKPEELVRTPEEANAGEKVGQNPDTASQGHPEVQAPSQTGSPEAENGCGSPREETTPGEHTDTGKATEGTASEERVADEDRLGQKSPDANMPEEEGVVREKAPQTSSGKAEGTTIAEPDTKQKEEAPLEPSCSPGADHAAGEITSEIQNEKAVSMDDIPIEDTRM

SEQ ID NO: 294 - DNA, 77121 bp, Homo Sapiens
cagtcccgcagccgagcgcagccgggcgcgcgccaccgcccactcgccctgtgcccgccgcagcccgaaactggccacggccgggagcggaggggacagcggggatcgtgagctccggcccgggcgagcgggtgcgtctgccgcagagtcggcacctgaaggacatggaggtaaaggaccccggagggagacgcggggctgagcggtgagcggtgtatcgggcgccccttccccgggcggctgcccctgccctgagcatggagcacgcggctcatcgctgctgccaactagaagggcaaatgcctgctgttccgacgcctccttgaccaactccgaaggatcgtccctggtcccacctaggacacccgggttgggaggctggggttggtaaggaaagatctcagagggagagaaaagggctttcctagaggcccgggtattttggctaggaacttaaatgctaaaaaaaaaaaaaaaaaaaaaaaaaaaaaaaagttaggtgcagccaaggtttgtaaatgggtaaacgtgtcagcaaaaactgcaagaaggcagaagcccttcaatctgaagagatgggtattgaaagagaaacagaactggcaacacgaggccagcacgtcttcgtgggtctgtgggcttcccttttcgctttcggagtggcattttagagagtccagttgtcttcttgcttctgaagtccttcctgtgtctgtcgcatcttcttccataactttctgaaagctccccttactggtcagtcgaatgacattatttctgataaaacttaagactcccttggacacccttgcctctgaagctgtgtgtatggaggtatgctggccacatctgcaggctttgccagagggaggccccgcacttctctgcctgctgagaggaggtccggggactttccttgttctgttccaacctcagcagaggagtggttgggtgtattccccacatccctctcttctgcacatcttgaggcttccctgtgtttcctccttgaaaatgagacctgatatgtagccctaagtcaatcttagtaggacctggggcttttgagaagatgcaaatgttatatagttttaaaggtgattcccactcatattcaaaaggaaacatgtgttgctcactagactgtggtcagtgcaatcaggattcacagttaactccgctatctcttccccgctccaggctctgtgcctgggccctggtggtctttttatttttttcttttgagacagggtctcattctgttacccaggctggagtgcagtggcacaatctcagctcactgcaacctctgcctcccaggctcaaaggatcctcccacctcagcctcccaagtggctgggactaccagtgtgtaccaccatgcctggctagttttaaaattttttgtagagacaagttctcactatattacccatgctggtcttgaactcctgggctcaagtgatcctctaagccttggcctcccaaagtgctggatttgcaggcatgagccacaccactcctggccctggttgtgttttctaagctagactctgtgcttgccggcaaagcttcatgacttctctaaaggggcaataagtttgtcctttagagaagtcagggagctatattcaggcatccagcccagccagttgtcttcaaggaacagggaatcaccttcaaggagactttatagactgcaagaaccactggagtctaatatggaccctccacagaaacatttgcaaggccaggaagctctggcagattagggctggcggtgaggcacgcacacagcgaagctcagcaggtggtgtgcacacatccacccaaagatcacacaaacacaaaacaacagggttctctctgagctggccactgcttcagggcagaggagggaaatggcccaggcaacacccagcttcttgggttgggtgaagtctccttaagaaattgttttagaagtggcttccctcttctggaagtgtacaaactgccttaggccccaggctgcagattcactatgatgtatggcctgtctaacctcttgaagaaacggattggagataagagaaaagcaactcttagacttcaagcaggttgctgctggagggccaaatgcaagtgtcaactttgttctaggaaaacaaggagggtctccttccacagaggcagtttctcccccctcagatgaggaaggaatagtgtatggcagaggccctgaaactatcagctgagcaacttcctgtgtggcttggggggtggaggggattgcagtaaaagagaaggccctcccttattgagatgtgtagtaacttatgcaggattccaccaagataccaaaatcactcccgtgctagggtttgggagggacgcagggagggaatcgctcagccagccagaagcctgacaaatcaccctgcgtctattgcagggcatcaatttgctggttggacagtggctgcttttgaagtttctttgtccaaatgcctggaaaacaaaaaacaacaaaaacgaaacaaacaaacaaaaaaacaacatgcaactgctagtgaagaaagtaaagaggaaatctaggggccagggaagtgaccattcttagccaggaagtaaacttttcatggtgaagcatgatatgcaggagttggatttgggggtttctgaaaatctcagagtaaaaccctcttttgagaggtgaaactcagttttgggacatgaaagggctactgtatctggaaagaaattaagttatattacttctcagtactaggaatccaaaccagaccaaagagggttactcaatattcattctctaaagctcacgtattattggaagtctttgagagatctttttttaaagtcactgttaccattatcaacaacatcaatcttcatccctcataaagccctgtggaataaacaaagtatagatgccatctgatccctgccttttaaaagctcacaacccaataaagggactatatcctgtcacatatataatcttcaaatgcataaatgccagttgaatactgctgcagatcatgagttctgcaggagttcagactagattaggttcagaagaagccttggaagaaagatgtgggtaaggtggagaaggtataaggaatgggcacagggagaacatgccagctttgtccagctggctgggaaggaaggtaggaaagcagtaacagaaaaaaatgaaagtaataagataaatccaaggtcactgagtatagtagatgcccagctaagtgggtgagtgggagctgaaatccaagtcacttggaggaaaaggttactttttgttcatacaaaatctccttgcctagttgagcctcaaacgggtggctttttctaattcatgcagaggccatctgcaactcttgaaggccagagttgtatggccctggattctgctccatggacagtaggaaactctgagaggtgttgaggcagctggcagcagtgatgtagccgggatgatacagcaaaaatgccacttcatggagtgagcaagggaaccaggtgagaaagcatcttttcgagtacaggtatattctgacttcaggatacaataagaatggagaagatggaaaagagtaaagaccatgcgctggaagggaagtcagaaatcaccaagctgcccagaagagtgaagttctctatggtgccagggaaaatggcagtaccaacttttacagctccatacaaagccttttgcaggcagattttctcattggtctttgagtctccagaatgagcacggtgcctggcatatagtcatataatttctcaataaaagtttgcttgataaatgattagcataaatagggaactccttcccctctcggtctgtagctcaaacgtctccacctctggaaggcttctgtgaagcccccagactctacagcactctcagagcactttgttcaagccactattagaacactaggcagaactggaactgtcagcctccctaactgtcaccccggaaggctccttgagggcaggggccatgtcttatatatttagagcctaatgggcaccaagaaaggcttgttgcatgagcaaatattgaagagggaaggaagatcagggtttttttttttaacaagcagtgtttagatatgttggttttgattgttctaagcagaatgtccaccactccctaagaaatacaaacctgttatgatacaaatgtgattctcctctagaagagataataggtaatgctattgtggataggaacccagaggacagaggtgtgtaaagaaggagctggaggcgtaggatgtcacatttaagttaatactgttagtcacttaaatataaattgtgtgcactgccaatagcctgagggcacttgaaaaaaagtataattttcgctgactaaatcctttgtttgttcaactaaattgtaggcacatcatggcactgaaaaaaaatcataaatttctaacttaggtggagacaataaatgaatccttttctgtggggtaactgcaaatcattcccagatattatttgtcattcatggacctactcagtatttattgggcccttattacataccagatcttgtattttaaatgttacttaaaaattatggagctctcatgtctttacattctcacagactgtcagtattactatgatgagagtgtgtgtgtgtgtgtgtgtacatattggtgtatataatgtgtttgttttgtgacctactttttcatccatatctttttacttcagtaaacattttctaccacattttttaaaattatgggactaggagatagaagagaaacatgtaacgaatccaaatcttaaaaagattattttgatatttcaccgtgaaacactaggagaaacacccacagcctcgctgttttttgacccacccaccctctcactgagccatatgttggctgctggttggagctgatgggccgtaattaggaattgcacagcctctgaagctagagtttggctcggtggacttgtggcatgcccaaataccccacattcctctctggctcccgcgtgttctgtgggaccctcaccctcacactggcccccactcagcagacatcttccatttgttggactgcgacgacagggggaatttggggagtgagactctaagggcccagcccaggccctatcacaggagggggtgaatgtgcattcctggaaaggagtcgggtttcagagcctgatccgcagcgtggctcctcacagcactgcgagccagagcttggcgcgcgcggttccgtgggaaatctgaacactggcggctcagcagcccggtaatcttatcagggccgcaagagaaagcattttggttccagagaaatctgaaggcagctccgcttttctccagtaataatatttaagtctgtggagccagcctgaccaaccctattcaactcattagaatctaaaaatctcagagctctgggtgaaataaaacaatctttaactgccctctgccatatggtaaagggataaaccaactcaccaagaggtatcttgaggatttaggcactattggacttttggaaagccaacagcttgcaatttttctcttacctggggagtagttcaacccaagccttcagaagtaagacagaaggatggttcttgtagcagcaaagtttcagtaatgcttcggacacaggatgaacactgagttgccactatcaacaggattgccctaggaatctcctgaagctcatcaccagagccagacccgaatgaacactgtcctggttctttggtcttctgggcagtcagcctcccgtttttttcctttggagcttcctgaatacccatctcctgggaattgtggaaacagctggctaagcccatgaggctcaccctgtagagccatttatttgaatggatcaaatcctattccatgggaagggcctccagccagtgcaattccaaatcccaatgagtccctaagagaggtgcagggcccttacctctgtaagagacccctctgagatgccattagagcctatccttaatgaatagtattagaagcctccaagctagagcagtcaggtgggggcactgagaaattctggacattggaacagacattatctccagccaaaaatttgagtcagcatcatagatgtctccagccctttgttttgaacctgtttgtaccatgtcagggccaacctcctggcctcgaggtagcaatcactactctttcccaggctgaatcttttataattaatcattaatgattcacggcatgccatgcactagcttctttttgtttttttttgtttgtttgtttgtttttagacggagttttgctcttgttgcccaggctagagtacaatggcactatctcagctcactgcaacctcctcccgggttcaggcaattctcctgcctcagcctcccaagtagctgggattacaggcatgcaccaccacactcggctaattttgtgtttttagtagagatgaggtttcaccatgttggtcaggctggtcttgaactcctgacctcaggtaatccacccacctcagcctcccaaagtgctgggattacaggccaccacgcctggcccatgcactaggtttttagttagattcagtaagcacacactgagcccttactgcctgccaggcactgcggatctaaaggggtacgtatctaccagcttgctgacccttgaagaacttgcagtctaagaggggagacaaacacctaaacagattattgcagagcagggatgagagcttacacccacagaggaggagcatcagcctggggctcagggagggcttcctgctaaaaataatttctgagttgaatcttgaggggtgagtaagagttaaccaagggcagaaaattgggaagagcattccaatcagaaagagtgacaagagcaaagctactggtgcaagaaacagcacggtgtgcatgggaaataataagtagttcattcctggaggataaagcaagataaagatatttgaggactagatggggagtacaggaaatgtaagttgcagttcctgccctaaaaggaactcattctatttggggaaacaagatatacccaaatgacatgacataaaaacatgcaagatagaatcttgataagttctaaggtatgtgggcgttcaaaagctcctctaatacaaggtagagaaaactagcttcctgtgctggggattcctccacaagtgctgctcttcccccacctcctggcagccctagggtgcagaacacacaggagacctcaatctaatggcagcacatgcctgcctggggcctgccccaaaggctcctgctagagaagttgatttgaaataggctccaggtcccgagggaatgcctttggtcaagctcaccaaaaagccaccccaagtcctcctaccttctctgacagaaagagggctctaggaatagaccacacacacacacacacacacacacacacacacccccttctgttcccactcacacttccacctgcagccccgctcattccttccactatggccacacttcctgtacactccctgaaaagtcagcgtttctcctgcttgcccagaggcagacaagggatgcaccagggtggactgtagagcagcagccaaccacatgcatcagcccaaacccagtaagcagtgccgctgggccttgtggctgctattgcacaatccagcacccacgccacaggtcacagagaatttgcatctcacaatgtgccgcagcaggctttgggcctcctctgagcctccccgctagaccctccaccttcaatagttcattcccaatgcgtgagctaaatgtacgcttttcccaccctgctgggctgcccaccacgacctccatctctgaagcacattcccaggattcaggttcctggcttgtcatcctttacagatatgttttgatgaataatgggaaattcatttctgagcagccacaccgatgtcagtgtgggagagacctaaagcttgttgtcatggtaattactaccacttgttgaatgcctactatatatagatgctgtgcacagatttatttcttttaatcttcataaagtcatattatgtcttctaggaaaggatgctgaggctttgagatgcttaaatgatgtgcccagggtctagaaggtaattaccaaccttctaacatttgaacctaccctatccggtgggatcctgtccctgttcttcctcttgctctggagaaactctggcttcccccacagcacctgtgtgggctctcggggagacaacaggctcctcagcctggccagtcttcctccagctcaggccaggctgtggtggaggccagccagctcaaggcttggtgcttgtaaggcctggcacaggtttactccgagccctcctctgcacagctaaaagacttctgaaaggccccagttgtgtctctgggtgaaactggtgcccacacctaaagcaaaacaggaagacttttccaaattcatttttagggctttggagttttgagagcaagaaagaaccatagcaatttcttccatccccttcattttaaagatgacgaaattgaacataagcaatttaccaatggtcgtacttaaagtcagttagtagccaagtcaagagttaaaaccaaggtcctggtcgggggcggtggcttatgcctgtaatcccagctctttgggagggcaaggagggcggatcacgaggtcaggagattgagaccatcctggctaacacgataaaaccccatctctactaaaaatacaaaaaattagccaggcatggtggcaggcacctgtagtcccagctacttgggaggctgaggcaggagaatggcgtgaacccgggaagcggaggttgcagtgagcagagatcacgccactgcactccagcctgggtgacacagggagactccgtctcaaaacaaacaaacaaacaaaaagcaaaaacaaaaacaaacaaacaaaaaggtcctctgactcccagcacactaggacgcctttgacccgcatgttcaaatgaactcatatataatgactttattgattttgcatttttgtgtattgtcttcttggctctctgaagtcctccacacagtggtgctcagctctctaggtcttccctagcaagcactactatctgtggggatagggtgggtagggagaagaaccattttcattctcattgttttttttttctttgtttgtttgttttgaggtggagtcttgctctgtctcccaggctggagcgcaatggtgcaatctcggctcactgcaacctccacctccctggttcaaacgattctcctgcctcagcctcccaagtagctggtattacaggcgcctgccactgtgctcagctaatttttgtattttttaatagagacggggtttcaccatgttggccaggctggtcttgaactcctgacctcaggtgatccacctgccttggcctcccaaagtgctgggattacaggcatgagccatgatgcccggcccattctcattgttttaacaaatgccaagagacccagagctgaggctaggagggcccagctaccctagctgcagcgccacgccttgttctactaggcttactttctccgatgccctcaaggggtctttctgggggagccccttggcccctgttgtccagtcatgcctgaatcccctcacaaaggcctgaatttaagtactggagaggagaagaacaaggatgattccaaatgcttgttttccttggggaaacaaatgggagactcaaagagatgcctggcactccaggctgctatacagtgcggaagtgctgcccaggtggagaatctgatgccagtggagttggcaggtgtatgagtttgcgagggctgctgccgtaacagattaccacaaactgggtggctcaaaacaacagaaacgtctcctttcatggttctggaggccggatgtctaaaagcagagtgtcagcaggacctcattccccactaaggctcgaggggcggctccattccatgtttcttttggctcctggtggttgccagcttccttgacttgtggccacatcactccagtctgcctcatctttgccacaccttctcctctgtgtgtctcttataaggacctgtgtcattggatcaggacctacgttgataatccaggatgatctcttcatctcaaaattggtaactacctctgctaagactgtttttgcacataaggtaacattcacaggttccagggattaggaagtgagcatatctttttttttcctcctcaagacagggtcttgctctgttgcccaggctggaatgcagtggcacaatcatggctcactgcagcctcaaccttccagggcttaagtgatcctctcacctcatcctcctgagtagctggactataggcgtgcaccaccacacccaggtaatgtttgtatttttagtagagacgaggtctcactatgttgcccagactggtcttgaactcttgggctcaagtgatcctcccaccacagcctcctgaagcgctgggattacaggcattaaacactgtgcctgtctaggaagttatcataacttttagggggtcaccattcaccccactatcgcagtcaacctgctatccatataaaggtaaagaacttggggattggaggagtgaatcctgggttattgttaagctatattataaccaccccccgagcccccactagtgccttgggtgcaaattaccaaggaatatttattgacacctgttgtgtgactaatttcctgcctcttaggtagcccgtatatacagctgtgtcatccatacccctagtgcctgggtctcagctataattctctgttcagagagctgcagttgggaggggaagtctgtctccaggccgctatggagcatttccatgaagccatgaggatcacccccaactcatctggtcacttttcagggagataactatggtgtaagcaggctgggaagagccactcgagattatctaggatcaccaccaccattgtaaaggatcatgcctagcaagattataaaatcctattcttaaatatcttattctttcattaatcccttcattcatttatttagagatgcaccaagacgctaccaaatgcaaattaataagaccaatcctggctgggtgcaatggctcactcctgtaatctcagcactttgggaggccgaggcaggtggatcacagaaggtcgggagtttgagaccaccctgaccaacatgaagaaaccccgtctctactaaaaatacaaaattagccgggcatggtggtgcatgcctgtaatcccagatactcaggaggctgaggcaggagaatcgcttgaacctgggaggtgaagtttgcggtgagccgagatcgcgccattgcactccagcctggtcaacaagagtgaaactctgtctcaaaaaaataagaataagacacaatccttgccctcaagattcatacagtctgaaggtaaagaggggacataaatgaaagaagtaattacaaaacagtgtgattggttctgaaaaggcagtgagtaaacagtcctgttgcataaataacaggacaggctagtgttgctgtaaccatgccacaatcttagtggctgaaaacaacaaaggtttacttttcacccctgctgcaagtccattgagggttggctgggggctctgctctggctcatttcttgtcctccctctgagacctaagctgtgggagcagctacccctttgcttgttgtcatggcagaaggaaggaaagttctggaagactcacgctggccattaaatgctctcttttggaaggttcctaactatccacatggctccaattaaccataggggcaggaagtaccatcctctcatggcctccaaatgatgagagctagaagtacttcacaaacattgttagtggcctgatagagtcttagaagccttcacaaagcagacgatctttgagctgtgtctggaagtaagactgtgtctttcaggctgacaagagggggaaagccgagggagaaagtgtttatctgcaccactcagggctcattcgcttgagtcttacacggcttttgtggtcggagatgttcttgcagattgaaatgaaaactgcttcataagcacaaataatgttttcaatgatgtcagctgttcttcatgctttgggggtgattgagagaggcaagtaggtttgaacgagaagctaggggtgcagatatgcaggaaaatatatcagagaaatataaacataagcgttaagggcatctgtttagactgtttctcaagtctcttagtcctggaacagccaattccatggagcatgccaccaggagttgcaacttatagcctaggtggctcttgggaggtgaacgtctttgtggctatgtgagcagcatggaattgtctacgccttttgattggaatgcactcccccttggtgaaagggaatctatgtcttttttctacatgcagttatataacacttagaatcaccattctttcccataaggcttgtacataagccctaccttttgtccctaaggaaggagttggtgaaagtcggcctgtgagtaacattggaattaggcagtagaatttgaagaaatggtagcaacagacagccctctgctcccttaagtctttctttgcctgattattgattttgtagtagatcaagggggatgccatgcagagaaagaccatcaatcctgggttttaggttcagggtcagttaccagcctcaggatcccggtcagttccgtgctctgtaaaaccgatacctgctttacctaccttccaaggttattttgaaaaggaagtaagattatgcatgtaataaatatcttatgaaagtaccttgaagcgttcaattatttcacaaatgcatggtggtggtgttattagtatttattaaactgatattgtgaaaaattgtaacaaccctgagcgtgtcttctgtaagaaagcactggcgctctctgtgcctagtggaaggtggcagaagggaaggcaaagagggtgacattggtgcacatgagcaaagtgaacctttccaatataggacaaagaggctttttatagcataaaggaggttttaagctgtgcaacagtaataggaaaaatactttacacttctaccacactttattgtcaaagtactttcccgtatctgttcagctaaactgtaagctctgcaaatccccatcataggttctaacatccaatgatgagcataatgtatattcaacacatcctgtgagtagatgcaggaatgcaggcttcatatgcctcatggggaggcagtgcaatggcttaagggctaagagcacacacagagagccatatggctgggtttgagtttgactttgccatttactagcttgtgacctctccatggcttggtttttccatttgtaaaatggaaataatgataacacctacctgctagggttgttgtgaggtgtaaatgagtcggtggttgtgtaaagtgcttagtgcgttgcacatattaggtgtgatgtaattgtttattgattaaggaaagaggcttttataatcatttagaagagaacagcctcctgcgcttttggtgcagctctgactgggacacgggatggacaagaggacatctgaagttctcctccagcctgagagtttgacagaggggtggttattgcatcctgcctgcaaaactgccggtaaatctctctgggcttctgtaggaggctgggtcttgggggcaatgctggaacagtatcccacataaatccatactagaacctgggagactaggggaggcttgggcatagaatagcaaatccaagtgtcaggctcatgggcagccaaaacctgcaagaaaaagggagtcagtctccttggctcaagaaatatgttttggctgggcacggtggctcacgtctgtaatttcagcactttgggaggccgaggcaggccgatcacctgagatcaggagtttgagaccagcctgaccaacatggagaaaccctttctctactgaaaatacaaaattagctgggtgtggtggtgtgcgcctataatcccacctactcaggaggctgagacaggagaattgcttgaacccaggaggcagaagttgcagtaagccaagatcgcaccattgcactccagcctgggcaacaagagtgaaactctgtctcaaaaaataaatacatacatacatacatacatacatacatacatacatacatacatttcaaagaaagggagggaaggagagcagatggcaagtgtattttttgagttcacccaggtagatcaatgaaacgaggaggtaggaaatgggaaggagagcagtctggagtagagctccccttccacttcctccccccacatacctgggttgcctgtaccctgacaattccttacctttcacacctctgtggggaggcccctgcctagggagctgaacagggtgggattcggagactgctaaaacagctgcggggattggacagtaagaggctaagcattcagaccagagcccctctccctgtctaagctgacatcagtcctgatctttccaactgagtgctttcctatgccaataagggtattctgatttctcacgtggtcacattacttgtattacaaaggattttttgacaagatgtattcagtgcaggttgaactaccttgcccaaagtattttgattaaggaccccaggtctttcctgaagaaagtctccagtggcaggccacggggctctatccttggccctgattattaaacatttttgttaatgacttggatgaaaaatagaaagaatccagatgacccacagctgggatagttaatatgctacgtgacatattcaagttcaaaatgatttatataggatgggatgctgggccaaaaccaacataataaaattaaacagggatgaatgtaaaatcctctgcttaactttaggaaaatttcatgcactagcataggacagacctggcttggaaatacgcatgcatttgttccacaaatatttattgggcctactgtatgacagatgctgtctggattcctggagggagtaaaatataaagacagtatctcaataagctggaggtttagtggtggtggtgccaagagataagatgtgcccccagataaagcaggacacaggatatgctaaagtgttatataagcaacaagaccacgaggctggggaatttcacagagaaagaacattctcaacttattcaactgaagaaggcttattgggagagggtgacatcagagtggccaccaaaaactaggaagaattttttttaaacagatggtaataatgaaggggcaaagaaggggatggtggtgagaagctagtgtgatgagaagaaatgaaggatgcccacggggaactgtgagtgccctaagtgactagagtggaagacctcttaacccacatgtgtgggtgtgggtgcacatgtgtgtgcacagcagatggggagagggtgggtaaacactgttggaaggactggatgcagtgaggtggtgcacacgttagggagacagcactgatgctgcctgcttccctcagtctgtcatgagggtccttgcagagtggggctcacgggatggaagggatggaaggagcactggagggccattaattaatctagaagccgaaataccagttgagaggccaaggcaccggtgagaggtggccttgagaatggaaaggcaatgaagctgcgaaaccaactgcgggaagaatccacagtgcagatttggtatttggttggagactgtcacaggggcagagttagagagaaagtgatcagaatgactgcgttttccatctaggagcatggagaattttactcgttgggggtgcggaagaggctgagttttggttgaggcattgacaggacaccctgttggaaattcagaagtggagtttggagggctttgggccaaggcgcagctgggtggtcattcgcgcagcagtggttcaccacaggcctgggtggtgagcagcggctataaggagagaagcaggccaaagacagctcgggacagccctcacatttgaggaatgccaggaagactaaggacagtgaaagagggcttgggagttatagccgaccataagctaacacttttctaaaaaaaaaaaaaaaaaagaagtagaaagactcaattttgtgtgagacttagagttttttttctttttctttttctttttctttttatattactttaagttccgggatacatgcgtgcaggtttgttacatagatatacatgtgccatggtggtttgctgcatctatcaacccatcatctaggttttaagccccacatgcattagctattgtcctgatgctcgagtttctaatcctgcctaggcgtcatccccaggactctcctttgtgtgaccccctcctttccagagctctttctcaagctcagggagtagatgcctcaagagaaataggatcctcggaacttctggggcatcgcccaaaacctggggtagtgttagccaggtagagaagcaggtagaggccactgcggtggctcatgcctgtaatcccagcactttgggaggacaaggagggtggatcacctgaggccaggagttcaaggccagcctgaccaacatggtgaaaccccatctctactaaaaatacaaaagttagcctggcatggtggtgcatgcctgtaatcccagctacttgggaggctgtggcaggagaatcgcttgaacctgggaggcagaggttgcagtgagccgagatcataccattgcattccagcctgggcaaaaagagtgaaactccatctcaaaaaaaaaaaaaaaaaaagagagagagaagggggtagaggcaacagaattacttgtccattaggcacatgtctttaagtgcttttagtgttaatcaggctgcaggttccacagcaagcaatttataacccacagccatgcattgggaaggcctgcatgaggcatgttcttatttttaaaacaaggggccaagcacggtggctcacacctgtaatctcagcactttgaaggctgaggcagggtggactacttgagcccaggagttcaagatcagcccgggcaacatagtgagaccccatcgctacaaaaaaaaaaaaaatagcagtgcatggtggtctacctgtagtcccagttattcaggaggctaaggcaggagaattgcttgagcctagaagttcaagaccagcctgggcaacatagtgagacctcatctctaaaataactaactaaattaattaaataaataaaataaaagcagtgcatggtggtgcacctgtagtcccagctattcaggaggctgaggcaggaggattgcttgagcctgggagatggaggctgcagtgagctgtgatcataccactgcactccagcctgggtgacagagtaagaccctatatcaaaaataaaacaaaacaacgataagaccacaaccaataaaaattctttctagaaaaccctaggactgttcaggacattttctctagtttctagtcactttgttttaaaatattaatttgctaaaattaagctaatcttaaatattttaagatttgaaattcatcatcttaacacaactattttctttttcttttttttgttccttgaaatcctcaattatatcccttttattattttttaaagttggaataaaaagacaatcctgtataatataactacttcgaattttccacatctttattagttttagccaaatgcataattcttacataattttaatcagtgtatatacaactctgtactctatcttttctcttaacattatttccaggtcagtattcttgttcctcatagtcatattttcattgtaaatgtcttcacgacactctgttatacaaatatatcataattatttaatcatttttctattttggaacacagcatttgcttttactttctccttattacaaataacatagctataaacagtacatgtatctttttccttcttttgaattatttctctggaagcaattcccaggagtggaattattaggtcaaaggatatgagtgtctcttgacaagcattgccaaatcagccctggccttccttccttttgcaaagactcactgtatgtacctggtgtgtacaattgcaggctcagcgagatgtgccaggtaggagacatgaggtgagagccctccactaagccggtttagcaaagagccctttcctcccagtgtcttccagcaagtcctgtggttccccctccaccagcagggagtggataggaggggagcacaggaaaggggtgtggaccccctggaaatgaagcaatcatatggtagttcccgctggagcagctgcagatagggggaagttacataccagtgatggggtgcgggcaacagtgagcccggggacaccaggacaccaagaatctcacccaccagtcagggatggaggcagaacaccagagggtttgggctgaactctagagaatgatgggctggtcctctaggaaatcccttgaagtcctgagcaagagtggcctgagtttgggaggagaagcaatcagtcactcgcttgcttaataaatatttaataagtgcccactgtgtcagattctgtgctgggaattctggacacaaaaggtaataaaacttggatcctgccctcagggaggttgcagtctggtaagacagtcagaatgataacaagtgattgaaacagtttggttaagtattctaagagatctgtgctcagaacacagatctgagtatgacctaggtatcttgcccagagtggggaggggctgggggaaagaaagacttcttaaaggcagtgaaacctgagctcaatccaggaggacaaagagggaatggatagttgaagggtgaggaggagggtgttctagctggaggaagtagcgtgaaagaggacagtgtgcaggatccaaccagattgagttggtaagccaggcaagacctcgagaacctcttcagggcttgatccgggaggtgccgggatttctacacagaaggcgcttggggctacagtctaattgcaaggggagagtccaaggggctagccttgacactgttatttgtataacaagcatacttttcgcctaaaacggaatatgtatttggtgtggctgatgatattatggggtgttacagctctcaaaaaccacagcttggcctcaccacttgttttattcccagagtgatgggggggcagaaagttacataaccagacttgaatttcaggaagttggctctggccgtggttcaaggaatggattggagagagcatggtatgaggcctttaggaggctggtcattcatatggactaaagaccaggaaagctgggcttcagaagggactgtgagggcagagaaagagaaaaggagtttgagaggaggatccttcctcacagggacaagaattttctatctaaggcctagctgacgactaagggagaggacagcattgttccaagggacctgtgtgttaatggggatgcctgggtgtaggcataacatttaaaggacagacagaccagggcctgggtgtcttgtgtccataataataaacagctcacctgtgcctctggggcagctgtaaagatgcactgtgtgtgtccatgtgtgtgccagaggggaaccaagcaagtgttaacacgttgcaggaggaagctaggcagagtggccaacaggagttcaaggctctggaccaaatcccatcactaaattgctgtgggatcttgaatcagtggcacaagatttgggggtctcaccggaatgatcatctcatccctgcctggcttattgggaggattaaatgagatcatgaattcagagttaaggatttggaaagaatataaaagactccacagatgcaaggtgttgtctccactgtgttttggaaaacacggggaaatgtctgcaaacagcttggtccctcaaagagaagcaggtgctctggagcctggatgtgtgtgtgttggggtgggggcagggtcaagctgtgaggcgttcacctcccctctggcctctgcttcctcctcttcttgtggcttccctttgaagctctgagcagctgttacagatgagaggccaggctgggccaggcccagaccactcactcagaagcagaggctgtgtttgaagccaccagccagggggtaggcaggatttcctgactctcgagtgtttgggtccagctctggcctggtaccccagaggcctaccaggaggcctgtgctctctaaccagaaggaccgccgcccatcccttcagccaagatctctgttccagccacagccaaagccaaagtccaggagctgtagggactgccctctctctggttaagcattttgagttttagaaacaaaagcaccaattaagcacaaagcagggagtggagccaatggctctgcttgtgtgaggttagcaatggagtagggagaggggtgagcggagtgtgcgtggtacgatggggtaaggaggggataaggaggggggcagccccagaagcagcttccccgaggccaagttcaatgcctttattagttcggtagcgctgctgtaacaaagtgccatggactggatggcttagacagcaaaactttatttccttgcaattcgagaggctagaaatgtgagacggaggtgtcagcagtgctggctccctctgatgcctctctccatcttctccctgtgtcttcacgtggtcttctctctgtgcgtgtctgtgtcctcatctcttctcataaggacaccagccaggtgggaccaagggccatcgtaatgaccttattttaacttaatttcctctgtgaagaccctacctccaaatacagtctcattctgtggtactaggggttagggcttcaacatgggaatttcaggagacagttcagcccaggacaatgccaccagcctggagcctcacttccagctgtgggtgagaatggaaaagtcacagcagaagtcaccacacctaaccacagaatgccacaggctctgaacacccgatctgtactggagttctgggtcccacctttcccttcatgcctggctccttctgtcatgcctgccctgggccacatcctagaaagagtgtcccaggcaccagggcacactgcattctgcgctggcactgttgctatgcaactctcctcgcacgccgacctgggcccagcttcccttatgtcacctccttctgggtcgataaactcatgtcacgcctttctaacacagagtgcaatgctgtggactgtgaccaggtgtcttcctgcccttctatcttcttggcctgttgctcctgctggtccctctacctgcaacacctccctgcctcttccctgccatcctgcaagtaattttgttcctgttgagctcttaccctcccaggattattccatttggggtgctaggtcttcccagccaagacagaggagaagagggtatagatacagggaaagcatggcagggaacagggtgggatgagcctctgataggccttctccccgctgttcttgaggggggctgcgttcctccctgacctccactcttatctgggggttgggtccaggtgttttttctcacccaaacagttaacagtgccttttcccacagaagggcagaagccctatttccaggcctgagatgggaggaggttcccccagcccaggctcctgcctctgttcatctttttttttttttttttttttgagatagagtcttgctctgtcacccaggctggagtgcagtggcacgatctcagctcactgcaatctctgccacccgggttcaagcgattctcctgcctcagcctcctgagtagctgggattacaggcatgcaccaccatgcccggctaatttttgtatttttagtagagacggggtttcaccatgttggccagagtggtctcaaactcctggcctcaggtgatctgccaggctcagcctcccaaagtgctgggattacaggcgtgagccaccacgcttggcctctgttcacttttcattcctcctggagccatgattcccctcttagcatctagcctggagaggatttaagtttaaaaggaactgggccctttaaagatgaaacctcaccgggcccagatacttgagtgtattttcagccagaggcctaggtaaagatacaagcagttgtcaggctggaaacaggcctgctgctccctcgagacagaccaacagttgctgccccagcagaggacacacattttctaaatattattttctaattacaagaaagtcaaacaactttaaagctaatgaacagtaccttttttgcccgtcgaatgcacctccagtctttgtgaatttgtattgatttgctgttatgtgactcatcgcagggcacaaagcatgggggatttttttttagcctttttcttgtttcatacacatctccatgtgtgagaaatgttggatattcgtcatttgtaatggtagcatagtgttttattatgctccagaatttactttgtgatccataatttacttcaactagtcttcaaaattcagtatttagatggcttctaatttttcacttttatgtcatgccactgctacaggcaattttgaataaactgcattcttctttattttcttatagtatattctaaaaatagaacaaagacttctcgagctttggttacacagttgcagattattgtctcaaaacagagtagaattaatcaaagtgtaatgctaacagcagtttttaagggaacaattttcgccataatcctggcagccttttatcattattacatatttctgcccatctcacagttgtgcaacgataccttagagttactttgcattttattaatgactgtcaatgtcatgtgtcttcctaaactataactttgggttggtattttctcccatgctttggaagtttatctcctttagttgctttctggtgtttattttacacagatttcgcaggtataaacatgttgtgtaattttccttagcaagcttctaccctggcagcccttgcctccacaaaatctgcttttatgaaagcagtggttctcaactctggattcctgttagagtcctggggggagagtttctaaaatttcaacacctgaggaactgggcagactgctaatctgatttaacagatggagatctgcctaggcattgtagcccagttacttgatccggaagacagagcctcagtctttatccagcggctgatgtctttaaacccacaaatattgcacacctattacgtgttggccactctgctaggaatatggggatgtcaaggtaaaggctagggtacctaccttcaaggcgggctcacactctgttagagagacagacagttcaatgtagcaagataagtgctatgagagagaattgcatggagtggctatgatggcataacccaggggagaggtccatgaaggcttcttaaagaaggcaggaaggagctggatcttggatgatgaagaagaactgtccaggtgaagagaataaggatcaaggcatttgaggtagaagaacagcatctgcagacacagaggcaggaaaatgcgtaataggttcagaaggctgcaggaagtccctggtgggaagagcaggggcctggaattggactgccagggttgaaaccccagctctgctgcagctttgtcacctttgtcattttgcttctctgagctccaattccaccttctacagcatacggatcataatgcttggctggttcaaaaggtagttttcaggatcaaatgagatcatcttcgttaagcactaagcatggtattgggcacatggtaaatgtttaataagtgttggccattattgaggaagtgttactgtttggtgaaagggccatgtacacaaagtggctcccaaatgcagaaggagctgagcgacaaagaagtccagtgtgccattggagggtgattttactggggaacttatggacagaagtatggtcttgggtggctgcaccattacccctcagaccagggattatataccatagggaaagggtacacgtgcttcagagggaatgggtaggaatttgatctaagggcaggatttaagtcagtacaagtttatcaaggatgattttatgtaagggcaggatttacagtaagtttgtgctcttacacaaggaacaatacttaaactggaaatttcagaggcattcctgtagccagggttaagcagaagtcaacatagtgctgtgttagcctccatagttacctttctggaaggagagattgacaggggccttatattctctactaagatgttttgattatttagtaggtagtatataaaccaagaaaagtcatgatgagacttatatttgagaaaggttatgtgggcaggagagggcagaatagacaagaggaaggagagcagaaagaaatcagttaggtaaccataatctcttcccacagtcgagagagaggtgatggcagcctgaagttcagtaactacagtgaggatgaagagtctagaccagaaatatatatatagaagacaggactaggcttagtgacctactggatgtgagaaggcaggggagacagaatccgacattacctgattgccatccccaaatctgctcctgagttcagctgggtcctgcagacccagccgtcatgtcttctccagatgggcctgtcattgctgcacttcatggctcccagggactgacttcctgaggttgagaaggctgtggaggaagagtacaagggcctcttgtttccgaagctggatggaggctgcacctctcccgaaggaaatgagctcagcttccccaaacctccctcctgcaaaagaaatcttaagtttagacacttggaacctgccccaagaccctcactgacatcacccttaggcatccggatagcttgttaaagcgtctggtccaggcccatctctgcctggggagggttggcccacaggagagaggtgctttgcagagaggaaatggctcaaaccagatatcgctttgtttgttttccctgtgaagaaaagagaccatttttttctctcctcttttattttttagggatcagggagatatttttaattcctctagtttcctgctgtctacaggtgtttcctatggtgttgctgtcagaaaggacagagctcgtcacataatcagctttgttcctgagattatcaaaaagtctccctgctatgacctgcgtgtgccatcccaaaccccctctgggcaaggtgaagggaacacaccactgctgcataacctgctctgtgccctccaccagtcaccctggggggcaaggcagggctctctcttaataccagctgataagaggtacaaaagtggagattaggagagcaggaagcccttggtctccaacaatactctgtggttgttgagttcctagctactgctaggcagctccaatagaatctttgcttctcatacataagacaactctcccatcccaaccagagatgacagccctgtagaacccgtgaggatgccttcgctattgaaaaggcagaatacttgttcatttaggcaagaaaaaatgttatacataaactaaaactttgggaaaaacaccatgttctacttgcaccagagaagcccattatgggaaatcctcttacaaagtgaagaaactattagttaaacaacataatctctctaaatgtatctgtttacaatatacatggatttatggagcctcacatctgtcttttagaagcaacagaacaaatatttattgaatattttaattatacagcctatcttttaaaaccctcacagacattctgtgaggtgggtattgtggactcatttaagaaactacggctcaggatggttaaggggttgagtagctgctgaggcgcaagcggaggacttgaacccaggtcttttcaacctgtctcgagttctatgacataatcctccctagaattcagtgaggaggtaatgatacctttgatattatttcatagtaagaacaatggtataatgatatgcatataataattaaaaagaaattaatatattaaaccaagagacacctccttgtcgggcaaatggaatgcttttactggaataaaatgcagcaggcaaacattttctccactattgaggttcttctttgttttccttttttaattgagcaaatttttaaaatcaatagattgcattttatctgaattttaatcttgttttgaaaaatcagatcatttggtgacactgggccttgaatgatcttttgaaaaatgacccaatgtaacacaggtagacagtgggctagagctgaggaacagcagctccattcatttggatggggacaggacaggacgccttccacatagtcatttacattgcctgcccaccatctaaaggcactggagttagcaacgcctcctctaaatgatgggagagggaggcatggaaacaagctacaaagctgggcctggatgaaaatgggtcttgcacattgggaagctctcccttttccatctgctctaaagggggtcattgctcccaagagtcaagctgcagtctcaaaataggagctgctgttcagaatttacatcactgacacagagtagaaagagagttcatagaagggaggatagctgtgtcttggtaagagtcagactgggacacattttgaacccaccttcactatgccagcatgtgaccctggttgggaaagccactttatctctatgcttccctgttagatgggactgataatacaataatatctacttcatagggcaagtaagaggattaagtgagccagtgtccatgatgtgccttgcacatagtaagcactcaatctatagatgttgattcctgtcctgctggtttttttcgaaactggtgaatacatgactcctttggagatacaatctgtttatcaccagggatatagatggatctatgcttgtttgtccaagacctacagaaaatcaggggtgtggggcctaaagaaaatcacctatgttcccattctctttcttttgtcctgtgatttggatttttaagagtatatgctgagatgacagggcccattttggcttcagattgatcatttgcttgagcagaaagcagttgccaatagcaaagggacagcatttttaaaaatatgtttagggctggctgcaaatggggcaaattgacctaaattttggtaagcctcatacttcctaaaaacagcttcaaggtgcatacatttaaatttagtaatgaaatatccttatgggattattagtaatttcacctccttcctcccctcccctctgggcatctgtgcccagtccccagacacccaggacttggttttgatatgctgagcagatggactgctcactgcagcgttgttttccaggtatttgttcccctgctcaaatcagacgtcctggagagcagagcttaaaattctcatttcagcattaaaattttttttctttatttgatgttttccatattatatatcttgacaacttgcttccttttccttgaaaatatatcgtggacagccctacaaaatcagttctagtttactcatgcacacacacacacacacacacatgcacgttttatttttgttttaattttttagagacagggtctcactctgtcacccaggctggagtgcagtggtgcgatcctagctcactgcagcctcaagctcctgagctcaagtgatcctcctgcctcagtctctcgagtaactgggactacaggtgtgcaccaccacacctggctacacacacttttacataactgagatggtatgagacacactgggtttatgcagcagtgcttttcttttggtttgcttccaccagatcagcccccctccctgtgtccagcctccagaaacttcacatatacctttctgtaggatactttacattcacataactatataaaaaattacatatacattgtgagcatatgtgtacatagagatacacacacaaggggtaagttttctggttgttgatttataaaactagtgttatataaacttatctgcatcttacaattctcactttacaatttttcctggaagttggagtttttttgttgttgttgtttgtttgtttgttttttgagatgaagtctcgctctgttgcccagactggagtgcaatggtgcaatcttggctctctgcaacctccgcctcctgggttcaagcaattctcctgcctcagcctcctgagtaactgggattacaggcacgtgccaccacgcctggttaattttttttttcttttttttggagagacggagttccaccatattggccaggctggcctagaactcctgacctcaaatgatccaccctcctcggcctcccaaagtgctgggattacaagcatgagtcaccatgcctggcctagttcattctttttaatggtttcctaataacctgttatgtggatgggccataaaccatttccctttttatggtattttttttttgtctctagtgttttgctgctgtaaacagtactgcagttagcccccatggctgtgtacgctagcatttatgtctatggggtagattctcaggagtgtagggtgagctgaagggtttgtgtaatctaatttaatcgatgttgccagattactttcccaaaaggctgtaacaagtcacatttactccagcaatatatcaatatatgagggttccttatctccatttccccaaccgcaattgctattttccctcctctctctctccctctccttcccaccgcccatcatctgataagcataaaaagaaatcttagtgttaatttaacttgcatttccctgacaagtactatcgtaagtttgagcatctttttatgttgattggcgttttgaatttgcttttctatgaattgcctatttatatcctttgttatgtattgttcctgtcattatgcgagagtgctttatataacagacattacctcattttcatctgtgttagaatacttttccaggtctctagttttctctttacttctttgatagtatttctatatgtaaataagttttacattttcctttatagtcaggaggttttgtttcctggggttttaaaattttaatagtttctgggagttttcccttagttaaaaaagggaaacatttattttaacacctttttgggcacactctacactctgccactgcatcctatgtttcaactaagtaatctcaatttgccttcagaatgccatgaactgcagagccaggcgtgggaatccagcaaagcatgctgggaactgtgatcacaggctccccttggaccacgtgtccattccctggccagatcttacagctgataccagtctggaatttttctagctccagcttttagcttctgtcatctctttcctcccttgtcagccccctcccccatttgctccttaaatggaagttttccttccattttctcagctctcttctatattttgcccttctctctggtgggatagatgtggaatgtccctgaactcgccatgcctctgctccagggcctcccagggttacagggtcttttcctgccatcttagccaggtcactcacccttccctggacattgaacgctctctccaaaaggatgtctgcatcactgtgagggctgcccacgtgcctcttttttgcaatcttggtttgcacgtaagaattcaggacaagtgttttctcttaaactcctcgtcatatttaccccttcaggatagattccaaataccttggctccatgcttaatagcttgcatttgttgaacacttgtctgtgtgccaagctctgtgttaagcattttacatgtgctctcttgtttgacgcctatgatgttaagcgttcctatcctcacttttagatgaggcccctgatgcttacagaggttgttacttgcccagggtcacataaggaacagagtggagatgtcagtcagacactccatctccagaacactgtctataatcacgttttgatcacatctgatccccatccttaccccatcacttctccttcctgggcccatagccacagccacacttaacaacctgtgctgctccttgggctgtgaatcatgccccctagagttacaacctctataccattggctccttaattcactgttttgtttttttttttttagaaacagggtcttactctgttgcaggctggagtgcagtcatagctctctgaagccttgaagtcttgggctcaagtgatcttcccacctcagcctcttgaatacctcttgaatatgtaggactataggtgcatgccagcatgctgggctaatttctctatttttgtgtagcaatggagtctcattttgttgtccagggtgttcttgaagtcctggcttcaagcaatccttctgacttggcctcccaaagtgctgggatttcaggtgtgagccgccgtgcccagctttaattcactcttgcatttgatataccctggtttcatatttccctaactggtctgtcaacttcaatacagaggaacttaatttctctataaactcctccccaccaccaaattgttggttgattgttttttatttttcaggaacttcctttggcctccaccaaaatgaggtttagctaagaattctgtagggacactgaatcttcttaaatctcattgctttcaactaggggcctaaagaagtccctgcttgatcttgactatcaagcatgttctatccccaacatgggcctgcccctaaccacattaagtaaaatcagttgaaaataggaataatacatattgggatttccttatttttaaataaacattggtttataaggcacttaccatacacattgtgacttatcttcattataatcctatgtagtagatatcatccccattttacagaggaagaaaatgaagtcgagaaaagataggtagcttgtccagggtccctgccgtgaagtgcaggtctgggactagaccctgcacttctaactccacatcctcccctggtggagtccctggttgagggcctagttctggatcttccatgccagcctgtgcttggacgttaggctgatcgcagacagacaagcatgggccagtctggcctcactgccagcactgtgctgaccctggggtggaaatgaacaccatttctgctctctgctttctgtagggatctagaaggtccttttgcaatcctggatcctctctgggtgtagtggctggaagccactaagagtggagccacctctcctgcaaaagccacagcagccaccatcctgggctcctggaggccactaggaagtggatgtggatgtgctgaggtggtgggataaagtactgcctgggctgtccacagttccgctgtcgattaatatatataaaatcttgtgagtcatctgcccaaataactacacaaggagcagattggccagtatccaaaaagagattcctcatgcctttggtggaggatagtacagatgctgatgggagtgtagcaagagaagattggcttatttgtatcttagatcttgcattcattgcttcttgggctgaggggccattatatttctgtgctcactataaggaggacccttcttgggtttcccatgaggaatataatgcacagattgatctgtgcagcaaccttgtatgttaacctctgcttagagtctgggagccccctgagggagtgaggagtgccccagtcactcaccctaggggattagtgaaaagccctgtctgtatctattccaaaagcttccctagatgacccattctattcttagagcccctgcttcctgccttgacccttcctgcttcagaaccatgaggctttcaagctggccaaggggctgggcctgtgcccttgctgtagcagatggcaaaaaagtaacaggaaagaaaacaaaatcttcattccatcttttatgacttttctgatgaaaccaaagtgaaggttattttttccctagctgggtagcagcaatcccctggggtgctgggggattggggtgtgcaggcagcacactcgtgtgtgtatgtggtatatgcaggctgtcttgatcttgctgtctctctctttctctctttctctttctgcctcctcatttctttttttcttctccccgttcacaattatacttcttctggccttgtgtcccttgatcatcttggtcactgttcttcattaccagtttttcatccactttcctctataattgcttgtggacacctcctaggctatttgagccatgccatctgctttccagaaactctccttttcgaaagaacggctggcctcagcttgctaatttggaataaaaggaccgtatcatattgggcattttattcctgatttaagaaaggcagggagttccactcctaaaatcttcttaggaaggaagaggaggaggagggatgggattctttacttggaagagctgagtgtgaagatgttggggctgtagcaagcgctgggtttgcttggcatccctgagttccctggccgagtttcttgcgattctgcctgaacttatttaggttatccattatccacctctattttcatctacataagaaagataacccaagttttcccaattttcttcttacgttatgttaaaaatgaagagcaagccagcagcgtgggtcttaggaagcgtcctttgcaagcccctcatctcacagatgaagcagaaggtcatcagggccagtgagttcacgccgctcctctgactgctgggtcagtggcctcgcctgcctcccagctgctcagctcttgaaatgactcatctggatcttcccttctaactttgcaggacagggcttgtctgctcagagacttaaccccgtagtcccactccctagaccattgtgttccctggagaactactcaggccattcacccacagaagcctttgagagcccctgccctcacttgagaaattatccccatcaggcctagacctgcaggggcaggcacagccctcaaactgtggccacacccctgaggccagctgcactagccagctgcactggacttgccctttatggccccttcataccatacgcctgggtaacggcaagaccctccccaacctgcagaagccacaagcagtcttccctctgaaggctgatcctgacccattaccctaccccacagcctggagacatccaaatgaccccagcacacaaatggcccttctctgagagagtgtcctcatggctggaggccagaatcacactccagcttgctcttgtggttccaaagactcccatttgtaaattcctccgacatgaagatgcaatgccagcccatctgctctgccaacctattctgcaagatgggaatgaaaatgacttggcaacagcagatccctgccacccccttagaattcttcagggccaaactggcaacagcctggtatctctacgaagagtgcaagggagcccacattttgactaacacctactgtgtgccagttggtatcttaggtgacaacaacaatagctaaaatgaggggagagcttattatgtgccaggcactgtgctggggctttatatgcaatatctcatttgggctttatcacaattctaaaaaataagtgctattataaatgtttattttacaagtggggaaactaaggctcaataaggtcaagtgtcttgcctaagatcacacatctagtaaaaggcaaggtctggatgtgaacccaaactgtctaatcaaacaccatctcctagtatccccatgaccttgtagggggtgttattatcctcattttacagatgagagtctgaacagttaagtcaattgcctaggatcccacaacccgtcaattacagagtgggatccaaacctggtcttgccaagctccaaattctgtgctgtctccactatcttgctgcatgagtcctggcagctgccctgggctggacaggagtggctggatgtggcctactcccagcagctaccagaggctgccagcctcctgcagccacagcgcattcctgctcacgccctgaggcacacagagctggcatcctgagaccaagccaggttcctagccctagggcaaatgaaagacctcctgcagcctgagtgcacctcaacttttgtatttgaactatcatgagcactttaaaatgttttaatcacctttttgaggtaaaatatatctacaataaaattcaccccttttaagtgtatacattgatgagtgttgacaaatgtatacagtcatatagccaccaccacgagatgtagaccatgatcaaggtatagagcatttctggctggctgttatggctcacgcctgtaatccttgtgctttgggaggctgaggctggcagatcacttgaggtcaggagtttgagaccagcctggccaacatggcaaaaccctgtctctactacaaatacaaaaattggcccagtgcagtggctcgcgcctagaatcccagcactttgggaggccaaggcgggtggatcaactgaggtcaagagttcaagaccagccggaccaacctggagaaaccttgtctctactaaaaatacaaattagccaggcgtggtggcgcatgcctgtaatccgagctactcagaagactgaggcacgagaatctcttgaactcaggaggtgaaggttgcagtgagccgagatcgtgccactgcactccagcgtgggtgatgaagtgagactctgtgtcaccaaaaaaaaaaaaaaaaagaagaagaagatatagagcatttctatcaccccaaaagacccttcacactctttacagtcaattccctgcccccaccactggtcccacgcaatcagtgatcttctttctgttattatagttttgccttttaaagaatgttatgtaaatagaaccatacgggaagtcatttctgtctgacctctttcacttaacacaatgcttttcagattcatgcatgttgctgtgtgtatcagtagtttgttcctttttattgctgaatagtattccataatgtacgtataacacaatttgtctgtctacttacccattgatggacatttgagttatttctaggtctcagatattaataataaaatttctttgaagatttgtatacaagtatttatgtgaacataagctttcatttctcttgggcaaatacaagtaagattgttggtaggtgtagtgtaggtgtatgcttaacttcacgagcagctaccaaaatatttttcaaagtgactatactgtttcacattcccaccaacaatataggagtgatccagttgttctgcagcttcaccgtcatttggtattgtcagttcattttaatttagccattcttgtgggtgtgtagtggtatctctttacagtcttaatttgtgtttacctaatgactaatgtgcttattagtgattcatatgtattttttggtgaagtgtctgtttaaatcctttgcccatttttactattgtctcattattaataaatttgatgagcaccttttttttttttgagacagagtctcactccgttgcccagtctggagtgcggtggcatgatctccactcactgcaacctctgcctcccaggttccagagattctcgtgcctcagcctcctgagtagctgagattacaggcgtgtgccaccacacccggctaatttttgtatttttagtcgagacggggtttggccatgtttgccaggctgttctcaaactcctggccttaagtgataggcctgcctcagcctcccaaagtgctgggattacaggcgtaagccaccatgcctagccaaatgagcactttttaatcccaaaacgtaaactctctatgcttttcctgctggaggcagtgtggagttgtggttgggagcacaggctttaataaaccaactgagcatgggttccagatctcccatcagtagctccacaacccataattcagttacttgggctcctgagtctcaattctctcatcagtaaaaaggagataattatgaatccatgtcacagaggtgtcatggggattcaatgagatcatcttagcacagtacctggcacaataatcattcagtaaattagctgttttattactgttgaaaaatacattatgaaagcctactactactcattcaaaaccagtttctaaagagagacagtgagcaggaaggaagtgtagagagaattcctgagtatgcggatgatgctagttacagaggggacttgccactccccacacacaggtctgaattctcatgggaccatgacggaaagccctggaatgctttccgtcagccctgggaggggacagtaactgtgaatcagcccaaggcccaaagggagcatccagaggaaagggtgggtggaagagagagggctggccatcagcaaacctctgcaggctgaacacccaacagtcttccctgccatgccaggagcctagctgctttgctctgtaaaacctaatagaacaagcttgtccaacccacggcccattggccacatgtggccaagggggacggctttgaatgtggcctaacacaaattcataaactttctttaaacatcatgagttttttaagtgtattttatgtgtgccctaagacaattcttccactgtggcccagggaaaccaaaagattggagacccctgcaatagaactttcaagtgaagcaattcaactcagctggatggcttttgtttcttttccctttttgtagcaggctggtgagaggagatggaaaagtttattttaaaaactcagctccaagactccttttggtcccattgtagctgagtaggcttcaagggagggggccgcctcattgtagctgagtaggcttcaagggagggggcgcctatcccgtactttggatggagccctcttgatatactagagactgtggaatcctgccttgagcatccctgggctgcagaggagcccttggaaggggcttggaggcatggagcctctcccttggtgactgaaggcagatactgagaccggaccagagatgtggacttcagaactggggcagacaccattctactatattcataatatattaattctaccttctgcattataactttcttttcttcaaattttctccttgctgaaatggatctgaaaatatcaagcagcaaacagatatattcaaccactctagataaagaaacaaattttaagtatttttgatgtgtcatgttctaggataggttgggttgttaaaactggagaagacagatacccatggatagagatatggaattataatagatttcatagctccagttagagacaggaggctcagattgttaagtaatggcttgggcaggagaaagtctcattctttgccctttggttactattttagggagcttggacaagtcactgaaccttaatgaaaatattcaagcctggtatgctcagagcctccctggatgacaatttgtttccatttttgcttcaaggtcctgatctatatttatcaatccctcacaatgttgccccagtggtattggtttacggaggcatcattcatttatttgttcattcatttaccggcatttactgagtacctactatgggctaggggatggagccatgaataacacatggtctgtgtgctcagcaattacagtagaaagagaaaaacatgaaaaatgtgggtattttaaaagctctcgggccaggtgcgatggctcacacctgtaatcccgacactttaggaggccaaggcggatggatcacctgaggtcaggagttcaaaaccagcctggccaacatagtgaaacccccgtctctactaaaaattagcaaattagctgagtgtggcacctgtaatcccagctactcgggaggctgcggcaggagaatcgcttgaacctggcaggcggaggttgcagtaagctgagattgcaccaatgcactccagcctgggcaacagagcaagactccgtctccagaaaaaaaaaaaactctgtgagttccagccacatcttctttcagttcctcaaacacctcctgtctctcctccaggaggtttttgtgtaaactctactcaaatgcccttggctacctctggccaccctctgactaaccctccttacccctcaaacctcacactttgcctggatcacttctactgacctcagtttaaatgtcacatctttgggtcagattttcttgtcacctgctctcctaaaacccttttcctcttcagcatttatcaccctaataaataataagctggagctaagataataatggctatggaatatatgtctcccctactagactgtaacctccattatgaaaggactcttttgatttggttcattcctaaaccctgagcaccaactgcagggcctggaatacagaaataatgaatgaatgaatatgtccaagatgtactaaaaaaaaaaaaaaaaagagggagctgccaattctgcctgaatgggggaaggtgcatggtggggaaggggagcttcacagggggttttctggaagtgcccagggtgaaactgtgcttgaaggaagctcagatgtcagtttttcagattgtgctgtctgtatatctaggcattcataaatactttctagaactttgtgtagtgttttgcaaatgtagttaaacagatttgcgaattcagtaatttataaaaacttaagcttgtgttcttctgaatccctttatttttcttctgcctccgaattagacacttcccctatgcattaattccaagtacagtcaaagattaagtaaggaaatgatgtgcatgaaaaaagttctgcatgtttgctaataatctaatgactgtgacatctaaacactggaaacaccttgatttatggataatagggctatctagaattttcaagggatcatggacaaataattataggcaatttgatcaagtgaccatgtaagaccattggtgcagatacagactgattaaagtggaaaaagttcttttttcttcctagcttcctgctctgccattaccttgataatgtgagccaaggcctattggcctccacaggacaagccctaggctgtagtctgggcttgcttgaacctgcctgacctgtcacttcaaggccagccctgatcctctgagaatgggcctgggaaccatcagaaattatgtctatttgcagcaggcagggcctcttttggtctccagcatagcccttgccccatctgctcttttcactttacatggagtactaggcaaagtggcttcctctttgggttttgttacatactttaaccaagactgtgcatgcaaatggcctggcatgtactcggtgctcaggatgttgcagctactgaattattatcattgatttcttctgcgtgtgacctggatccacaagtcaaatgcaaaaatttgtcttgactgatggtcctctcctgtctccctccagtaccccctcttgaggcttgcaggggcagggaccagagggcccagcaccatgtcctgctaatgctcactcctgactgcaagggagtcagggttgggagacgctgtaacaggagaggctacagctgactgggatgcagaccgggggctgggtccttaggaaatttgttctaatcttagaaggtatgccctggcttcctgctgcagcctgaaggacaagtgtcccagacctcaggacacacacgcacacgcacactcacactgtcacttgactcctgcctgggaggcaggaatggcccctagtgaagggtacttgtgtgggcctccaggtggctgtaacataccccaggactccaggcaatcctggaaaggtggctcctggagaccaaccacccttcagactcagaggagctctctgtgaagtcaattttattattgaactaaccaacagtagagagtcagagtagtgcataacagggagattctgaacttaccttggagagtaacaaatcgtacatttacttgttggcttaggtgagtaaatccatctaaatcacccatgccagctatgaagagacacttctttcccactctttccctttgcaaaagaaaaaaaaaaaaaaaaccactcgagctgttcagaggctgccagactgacaaggttgagtttgatcggcagctctgcccctgcatgcctgctggtgggaaaaggaaagagaagacaaaaatggttgtgtgtaaccccctgaggcattgctgccttctgcctcttcatcccagcaccctctccatctcctctgcagcctttgctcaccctccctgtcttcagcctctgccatcaccttgtaatttgagccaagattcaccctcaggtttgtctgactccacaaatcccaagcaggtgcttcagggtctgccgtgggccctccactctggcaactcaccctttctgagcactcctccagtcctgctcctcccctcggctccccctctctgtaaatgacactcctctccacccagaagccagagccagaaatctgggcatcatcttgactccaccctgccccacccatcagtccccaattctggtcagtccttcctcctaaattgcttttgagtcctatcaacaatctcccctccactaaccatacccccatccaggccatcatcctctctagttttaaagactcctgaaatcaacagaatattgactccaaccctgtggatccaagccatccttaagatctctacttattttcagatggacttatctgctcatggtcaccactgggcccagttttctgcctctgctgaatccctattctccgttttcttataaagagggagcctcatctgctctgctctgatgaatccctagcgcctggcctagggtctggcatgttgtagggtctcattaatagccactgagtagttcattcaataaactccacatcttgaagccattcctttactcctctaaatgtgggctatgctcttgattctcactctacatgtctaaaaagcacccacaaatagaaggcttctgcacacagttcaacttttactgaaggtctgctgataccacacagctaacaattctaaatcaaggatttgagatcctgatcctcacagtcctttcagccatcccattgccagaggttctttctttcttgccatttcaccccggaaggggccagcccttatccatttctcagctctccttactcctgctctcctccacactcactcttcccaaatgcagctcccaattcccttggcagatccagaccccacaagaagctgaacccagtgaaaagatcttctgccaccttctgcaggagacagcatagttgtcaacttgctcattttttaccttccatgatagttgcaatggcctctagactgggctctccacctcctgaagaccactcctgaaccccaggccacacatgtcttaccctgcagccataggcatcttgcaaaaataaatctgtggttttgctttttgcttagaaccctccagtgacctcagatggccctcaggccagagtcccaacttaggcagcctttcatgctctggcctcatcttgcacgcatgcttacatgacagaacttgtcattccctgaggctcccctggccttgaactcctcaactgtgcagctccctcgtgagaatgaccagctctgcttacccttcaggcttggccagtttgttacttcctcctggaagtcttcccgggtgcctctggccaggttgtgtgctcctgctgtgcatttcaccatgtccttctgcaatcatagcacccacaactcaatgtcaactcctcctcctcctcctccacctcctgctcagaaggcctcttgtgacctcccttgcagaggtggaggctgacactctccatattagcaccactcacatactatacattcacttgcttatttgtttactgcctagctctctccactggaatgtgagctccagtgataagcagtgactttctcttcttccccactatgttctcagaactcagaacacatcgtgggtgcttgcaaatacttgaccgactgactgtattagtttcctatggctgctgtgacaaatgtccaccaacttagtggcttgcactatatgaacttattatcttagagttctggaggtcaaaagctcaagatggactaaaatcaagtttttggcagggctgcatttcttctgaagggtctagggaagaaaccattttcttgcctttttcagcttctagaggctgcctgcatttttgctggtttgtggctccttcctccatcttcaaagacagcaatggtgggtagagtctttcttgcctcccatcactctgactctcactcttctgccatcctcttccactttaagggctcttgtgataatatgggagccactgaataatccagtcagctgactggcagccttaattccatctgtaaccttaattcctcattgccatttaatctaacatattcacaggttccagggactaggatgaggacatctttgagggccattattctgctaccatactgactgacctatcatactttacatacttgcttaattgtccctgttccacagtaggccatagactccagaggtatagaccatgctcatcctgtccttctctgtgtatgtctcatccagggtgctttcattcattgtgtctttagagcctcacaactatcccgtgatagttgggataggtaaggcaggtattttgatcccattttacagatgaggaggctgagactgcaagagctcatgtgatctgacactcaggaaagaggcagatccaagacgatgctcgggactgaccttgcgttcttaccagcaagcctctgagagctccctgcattaggcaatgggagagcatatgaaagatagcaataagcataattataagaagaagagaagaagaacaaagaagagaggaggaggaagacatgacaatgattcctttttaacagcactgccttaaaagagtagcagcagattccctccatttgcccaaggttttcagaatggattgaaacatagattgataactatctgcttccgcgtaatccttctaaacagcaaatcagataacttccctcatcatctcggcttaagaaatgaagtccacatgttgcagcacagcctcagtataacagctttcaccaagcacttcccatgtgctcagtgggcacttgaggtatgagctggcaccgaggaagctcacagtgagtgttggctatgatggctgttatcatcttagatactcatcaccacacaatgacacaggtattgcccacctgattttacagatgttgaaactgagactcaagaaatcaagtgacttactcaaggtcacctatatagctaatgagttctggagcctgaattataacttgcatatgccttactctggacaagccacatctttcaatttctctacctttctttttgcttagaccatattgaactaaagtttcccatagatatcatgcccttccatgcttttgacactttgcgtgtaccagccagcccctgtgcctacaacatgccttcctccttctcccctcatgcccaccttctctcctagcaagctgttatctgtccttcaagactctgcgtaagcatcacttcctctgtgaagcgttccctgattcacctaagcaggttaactaccccttctcctgagcttccattgcagtgttatgcatttcccaattgcagcaatggcctgttttcattctgatagttttattacaagtctgcctttcaactagagtagaagctcattgagctctaggaccatgaaacttcatctttacatccccacatctgacaagtgtcaggcccataaggtgttcaataaatattaactgaatgaatgaataagtgaacagccatggactgactgccccctcaagccagacccttcacaggtacttgacatgaaactcaccctgtcttcctcacagacctataagccctcccagtggtgggttggaagagactgctcagatgtgtctgcagctgcaaggcatgctggaggcagggaagggctgagcctgtgggtggagggtgctgagcatgagggaaggaaagtcacgaacatggaagtaaagccaatttccctccattggcccctcctacccacaatccaacagactggctgtaaggacctgacaatttttaaaaataacagttttattgagatatcgtttacatacatgtcacctatttaaagtgtacaatgaaatactttttggtatgttcacagactgtgcaaccaccaccacagtcaattttagaacattttcatcactgaaaaagaagaaagcctgtaggctttagctatcaccccacctcctgtcttcctatctcctctaggcaactattaacctactttctttctctctgaatttgcctattctggacatgtcataacaatgaaatcacataatatgtggtcttttgtgatgggcttctttcacttagcgtaatgttttcaaggtttatcacatttactatgtattagagcttcattcctttttataggtgaaaaatattccactgtatggctgtgtcacattttgtttctccatttgtcagtgaatggacattgtattagtctgttctcatgctgctaataaagacatatccagccgggtgcggtggctcacacctgtaatcccagcactttgggaggctgaggtgggtgaatcacaaagtcaggagatcaagaccatcctggctaacacagtgaaaccccatctctactaaaaatacaaaaaattagctgggcctggtggcacgtgcctgtagtcccagctacttcggaggctgaggcaggagagctgcttgaacccaggaggtggaggttgcagtgagccgagatctcaccactgcacttcagccagggtgacagaatgagactccatctcggaaaaaaaaaaaaaaaaaaaaaaaaagcatacccaagactgggtaatttataaaggaatgaggtttaatggactcacagttccacatggctgggtgggcctcacaagcatggcggaaggcaaaagagaagcaaagacacggcctacatggcggcaggcaagagagcttttgcaggggaactcccctttataaaaccatcagatttcatgagacttattcactaccatgagaacagcatgggaaacaactgctcccataattcaattacctcccacctggtccctcctattaaacatgagaattattagagctagaattcaagatgagatttgggcggggacacagccaaaccatgtcagacatggacttgatattttggttcagctgtttgacttgacccagagctctggacagctgggatgtgtgagtattcaaaacccttgtcgtgaccctaaaagccataaaacgaaactcagctgtatttattttttaattgctagataccacgcacatccatctctcagggatgatatgagctcagggttggggtgagagtgtctgttaagctcttgccttagtaataaaatagcccaccaaaatcgctgagtccagatggtccattcttgagcaaagaatggctgcaagcagcaaggagcacatcttagctagctggggctctatctgggacttctgtatccaagatgggatggaaggacaggagaagattagacatctaggatgcaagcctaggcatccctcagagtattcaggaatgctgctagccccatagccaacatccagtaatagctaacaattatcaaacacttcctacatgctaggccctgttctaagcatttcacctacaaaaactcattaaatccttccaatgagcctgtaacataactactatcatcatcattccgttttacagataggcaatctgaggcacggacaagttaggtaacttgtccaaggccatagaactagtaaatgtagagctgggatttgaacccagacagtctggctcaaagcctgagctctgtgcttcccttcatagagcagtgtaaagcatagtgcaccctccagggcagacagtgcatcagcctccttcctgccatccatggaagaagggcggtgccactgccagaaaacaagatgagtgtttgcatattgggttgaaccaaaggatgatagatgttaatggcctcatttacaaacaaggaaactgagactcagagaggttcacacccaacatatatcagaagcaagactgaaacccagatctgactctgaatttgttgttctttgtgctttcccacccccaccagactcaaaataatttcttttctttctttatgcttgtacaacagttggcacattttagagacaaatttcccaccatcatctcccaaattacactgataaaatcctgtcactgcaatggcattctggatgaacatctccctcttctctatggtcccctgctggcacctgggaatttgcccagacactagccatcactactaaacccacagacccccacctggaggaccctcccaggcaccagaggctgtgaactatgctgattttaaaaccactgaagcagccaggactgtttcccacagtgtgagaacagctaaaccctgtccgtaatattgggtgacaatgccaagtcctgggagcaaatgggaagccctggaggttccaaacagggacacactcccaggctcaatgcctgcgtgtgggtcctttgtgtgagtggagcacctcctgggattctccctgggagccagttgcagagaccaaggacctgccattttcagatccttaaagcctacaagtggttaggtaggggacatctgggacttttttggttctgtgtgagatatctgattacatgtatttgttaatatatgcttgtttcaattcctctaccttatctatttcttgcagttcttctttacctctctgtattctcctcacccctgaaaaaggctgttcactccttgagggccgtcacggttaccccaatgcattctacagtgtctacagatgctcaggaaggggtgattaaatgacccgacaatgtggatggggcacgcaacattcatgagtgacattcaggatttcttaccctctatcactttagccaaagaaatcttctggccctaagccatgtgaaccaaaattatctgagacaggtctttattcagaaagtttattttgccaaagttaagcatgtgcccccaggaggcaggtctgtgcctttcgccaaagatgatgttgaagcctttaatatttaaagaggaaaggatgaatattggggaaacaggaagaaatttttaaaaggtgtgggtagataagagacaaatggtttcactcttttcagactttgatcagcctttcaccagatacacaatttacatgtgagagatgagtagaggaaacagtccacctattgcctccatagctcagtgaatctgcatttttatatcagaggaagcaatctgatatgcatttgtctcaggtgagcaggagactgacttagagttctgtcctttgtcccgcacctgtgaagataagctatcaatttacattgtcagggtaaaattcaacaaaactgtttagggaaaagatcttgaggcccacaaggaattttctagtgggaaaaattatgaggggggtatgtcgctttttaatctttgtttatcttattcaggaataaagtgggaggcagatttgcctgatgcgtttcacagcttgacttttccctttggattagtgattttgcagtctgaggtttattttcctttcaagcccatcccatctgcattctacaccaaaatgccctccaggctcccactggaataacaggaccagtcccctcacattgagaatgaaaggcagcttagggtgactaaggagacatcccagacctcagtctttgggcctcttctcttccctattctctgtttcctctgactttatgcagtctcgtaacatcaactaccatttctagctagtgactctccaagttttgtttctggcctgaaacacttctctgaactccagacttgggtatatattcaacctcctgcattgcatctccacttagacgtctaatagacatgtcagactttcatgaccaaggaagaactattcattgcccaactagccccacccacccctctctccccaacatggctttcaacccagaagcaaataccccatgcatcccgttatccaagtcaaaccttcaggagtcatccatgattcttctctttcccttgctcacacccatgcatcagtaattcccagcagcctgaccttcaaatcccatccccctgcacaagccctgttcactcccgcacccaatctcagctggaccgctgccagcacctgcctctgctcaccctcttccactcctgtccctcctccacagacagctccttgatgcgcgactcaggtcacgtccctccttgaaaccctccaaatgacatcctgctggttcaagataaaacacaaactgcgcgctctggtccatgaggcccaatgtagctggcctcacactaccactcgcatcttcccgccccctcttgttgtccctgccacccttctcttttctctgcccctcaacctttgtttctgtctgtgcttctgctcagaacaattttccttttctcttttccccaactgggattcaactcatgtgctctctcttcagagatgtcttcccacattcccataaaataagtgccctgttttattttcttcacagcgtttaacaaagcgtcttatggtttcgctgtgtacctgtttattgctgaagtagcaacttctgaagggcaaggactgtcttgttcactgatgtatctcagggcctagaccagtaaatgcctattaacaagagactaagttaactcttccagtaaaggcatagagttagtacagcatgttggtgtggaaagagctttggaatccagaaaattctcatgcctgcacttactgacttgaatagtaacttacttagcaactctaggccccagtttcctcttttagagaggtaagaattacagaaaatatatcaaaggctgtaaggacagtgcctcccacataggaggtactctggtagatgagcaggtcaaatggacctacctggttcccagtccagaaccctttccatcctcctaggatagtaatggtcaaacattgggatacattgaagaactagggataactaaggacataaaggaagattctagagtcattgcagtatttcagagagattctatggtggtctttttgaagtgatgatttaagcgtggtcacactggaaggggtgatccccttcagttctggaggagtgaagaagcaaacatacctcagacctttgaggctctgggctctggcctatttctggtgagagagagaaacttccttttggccaagagcatagttcttccagccccacactgggctctctcactgcatcttctcttaagctgcagatgatgaggccttccctggggccttgtttccctaaaccatagcccaaaggctgggagatactgagaccttggatgagcgcagaaggtggagagacagggcagagcctaggaagcaggtagagcctagtctggcctgtacataaaggtctcattatgtggatggtcagcagtatccaaactgtgtttacgcaacatggcaacagcggaggggaagttccatgctgtccagacacaggggctcctcagttctcggaagaaagtcccatagaaatagaaagtaaacaccagaggtgattttctcctagccttggcaaagtcaggccagacagtaaccacaggcatggtttccgagttacctggcatggcccagctggaaggtagcagggagggcttcgtaagcaagacctgggcccaggaagatggagtacaggcctgcgatctgtaaagacaagtgtgagctaaagcagggcacaaagggagatgagtgcagaaaacagatctaagacatggaaaatggcccaagaagaaaggacaagctgaagtcaaggcaatgaccaggacctggagggtagatgctggcaggggagggacttacatacatctgggtatggtccatgggggtgagttgagggtgtcagtgactttgtgagcaggtacccaggccctgacaccagcagaccaggtcggatgggaggaggaggaggaggaggaagaaaccaaccttagatgagccctgtttttgtttttgtttttgtttttgtttttgtttttgtttttttcaggcagagtctctgttgccccaggcaggagtgcagtggtgcagtgatgtgagcagggcttactgcagcctcgaccaactgggcccgagtgatcctctctcctcagcctcctgagtagctgggaccataggcacacgccaccacactaggctaatattgtatacagatggggtctctctttattgcccagtctggtctcgaactcctgagctcaagagatcctcctgccttggactcccaaaatgctgggattccaggcttgagctactgtgcccagccaagtacatgctatgtttcaggctctgtgctaagtactttatggacatcacaggaacagagaaagaacatttaatccagagaggctaagggtgtctcaggaaagtctgggaataggtagagaaactgaagttctcagacctaacagtcaaggtgagggtatggccttagcgggactgccgtgaagagctcctggcccatggctgaggtggtatggtgctgagcacactggagaggggttagcagctgtacctgccagaactgcaaggcagaaatccaggcaaggcatcaaacaggctgagccaccagccccgattcatccccaagaccacacttcttccattgcagctatgcaaatcagaggctaataataatgttgagatttgtatagcactttagagttgccaaggcactttcacaaatgatgctacttaactgatgtccattactggagtctcaggagttggagtcagatgtttcacagattaccttgtttggcctgttctgtgtgactctggctgtcacttgccttctctgggtttaatgtgcctggagggcagacggtaataatcaatcagtcttctgcaacagaggatgggaagtgtctggagaggggctgatggtgacaggatctgccaagcttcgacaagctctggagtccttagtctaaagaaaagccattcactaggctccaggaaaacaaactcagaggtaatagaatctttccttcaacccagcttttaagccctaagtgcttccagaagcctcagagttctctcacttctgagccccttgccaaggctagttttgggacagggaagtaagggaggagcttttgattcctatacagctctatttttaactggaatttatcttcctgctccaccagtgattggcgcctttgaaactgaggtaaagcacactgtcagcaggacccaagcataaatagcaggggacagagagactgatctgtgatgtgggcaagaagttagacagatggacaaaccaatcagccagcatctttgccaagaacagctcaattaatcacacactgtccccaagcctctctctcgttgttccattctctgacttccttatgtggcaagtgtgagggtaaaacgtgtcaagtctaggagcccctcccagtggggaactcatcagggtggggcctcgcactcctcggctttcccccagcatcatggggaaatctggcatcttgaatagaggtgaatccttttatatctttatgtgaaatcagcatttggtgtttaggctggtatggagatgagcttgaattatagcaacccacagtaaaggggtacctgtcttttcctccagaacagctgttcgcagatcggaaagtccatggccccagcagttccttcaaatccctaaacgaagcctttttttttttttttgagatggagtctcattctgtcacccagtctggagtgcagtggtgtgatcttggctcactgcaacttctgcctcccaggttcaagcaattctcctgcctcagcctcccaagtaactgagattacaggtgcacaccaccacacccggctaattttgtatttttagtagagatggggtttcaccacgttggctagactggtctcgaacttctgacctcaagtgatcaactgcctcggcctcccaaagtgctgggattacaggcgtgagccaccatgtccggcctgtcaaagccttcttctcaaaactttgccccattaacttaacttccctgctggaagtggctgggaggtgaggagatctgcccctcccttgctccaaggggacagcatcttagaatgactaaagttatttactttggagggagcacccaaataagaaagctcagagacaccacttttagcacaaaaggagggccatggaagagtgtgtgtgtgtgtgtgtgtgtgtgtgtgtgtgtgtgtgtgtacaagggagtaagctcgctgctggagggaagcatcctttgtttttgtagaccacaagagccagggaaaggcaggatggactttctcagacaaactgctgcccaaatcctcccattttcagactagacgtgaggaggggaagtgcagggggagttcgaagtctgtgtaagaaatgctgccaccatggtgacaaaagacaaaaacctaatgtctccgggactggacatgtaaaaaatcttattcaaaccaagtggttatgtaggcctcctgtaacaaggcagaaacgaactggccatttccagcatcactgacttactctgtgtgtcttggtgacaaatggtacatgagaataaatggtgtcctggggtgcatcttggcctcttcagggaacctgggggcacctcaatggagggacagccacggtaaactgatgaccacactggaggcaagactcaccgccagtaacaataacaaccacccttccaaagcatttgcaatgagccaggccttgtcccagccctctgggtatatagcaaatcatttaatccacaaaacaactgatgagggatgtgctacagccatccttgtcaaggcacagaaaggctaagccatttgccccaggtccccaggctggtaagagatggagcaagtcagtgcttgaatccaggcagtttggctcccatccactgtgctatctgctctcgtgtcacttacttattaattccacaaatatttactgagcgcttctttacccatggcactcaagtagggaacaaaagacacatatatatgtgtttcaagttcaataaagggcatttgctcacccttgttcaggaggtaaggagactcgtacactgtcgcagacgttgccctttgccggtggggtccttgaggaatgagaaaattggacctgtactgcctctgacatcccagggcacccctccaggacagaaccaggttttgtttgtctccaggtccccaaagccacaccccgggccaagagcattgtagatattcactaaatgtgattgaccgaattttttaagtccttgaatgcaggagccagttggataatgctgttaaaatacctcactgtcacagcattcctgcttgcagccacaaaacaggtgccttgcatggcatctggtacccatttgctgattaactgtttcttcttctccatttgccaggaaagaccggcagagaccaatgccaatgtggacaactcggcgtccccctcggtggcccagctggccgggcggtttagggagcaggcggctgcagccaaggaggtgagtcaggccgcttcagagcagcctcttcagcagcgggcaggaggaaagggaaatctggtcaggcccagcggagagggagggaggaggcttggtagttaccaaattaggaagagaagccaggggctggaggggtttctctgaatgtgaggaatgtctcactgctgctgtgcctggacagaatctgtccccaccagggtgaggcttgcactctggccaggaggaatcagacacagggcagagatgggcatctgtatccatttccatcttgatcatccacctatacagacttagatctcacacagctgtgccaggcctggactgtgtcagaataaagaagttcctacagccagctcctgccctgtagccagagcaaggcaaggctggggcagactccaaatcgagaattgagaaagaagagagggcttgaaggaaagcacattcagataggaaaccagggatcaggaaggaagagcgtccggtgaccagtagaggaaagtgtgacaagggagggtcttaactttggagagatttgggctagattttcttgagtcaagcagtgtgagaagctcattagaagtgagatgagggggccgggcacggtggctcacgcctgtaatttcagcactttgggaggccgaggcaggcagatcacttaaggttgggagttcgcgaccagcctgaccaacatggagaaaccccgtctccactaaaaatacaaaattggccgggcgtggtggcacatgcctgtaagcccagctactcaggaggctgaggcaggagaatcgcttgaacccaggaggtggaggtttcagtgagccgagatggtaacattgcactccagcccgggcaacaagagcgaaactcagtctcaaaataaataaatacaaacaagtgagatgagggaagggtgccccaaggtggagagaaatctatcgtggccccttggggcaagtgagtacttatttgccttgcatttttaggtgcactatttcggggttttgttttcccatctgaaagatcaggttcataatttctagacagtacaggcatgtcataaaggataaagaagatagcattgatctcaggtgctggcactgcctgaaaactgaatgtgattcaggtcggtgaatctcaagtaaaagtggatattctagcaggaaaggaaatggagtggagagggtgaaagtcaaaatgggtagatggtaaatagaattaatttaaatagtaagcaggctgtcccaaagacacgcagttcccttcctccattcttaaatattcctacacttccctaacatcctaacattcctaaatccctaaaccttcctgaaaccagtttccatttccttgctcttcctccctgttgcctgatcagtgctctctttttctctgtgtgtctgtctgtcgccctccctccagacaccagccagtaaaccaacccgaaggaaaccgccctgttccctccccctgttcccccccaaggtagacctgggccagaatggtgaggaggtaagtgctgctgttggggctcagaggatgctgtgatgggttttctttcctcttcttgaggaaagtttggaggagggggcaccaaactcatactttaaagctcagactctgtgcagggaatttctccatttcagagtgaatctcctcttaaatgtttcctgaatcgtttactttggaaactaggctcctccctgctcccttttactgaggctcctttatgatttgtcaaggacacgaacactattttccaagcctgagaattttagcaaagagaatgggtcatatattattaacagacccaattcaggagccaggaaagttctgttttattcccagatctgacttaggtgatcttggaataaggtgtggagaaggtacctggaaagggggctacacttacatagggcaggacggaagcatgagaaaaccccgtgattctgcagtatccttgtaaagcctggctattgttcaagatcactggaagaaaaccagagcgcacaggaggcctcgttgccctcagatataaatagccaacgttaccaacataataaaggctctggtatcatagatcatagccagtaataggttcttagcctgcatattctcctatctttatttatctaattgtagctgcaggagtgccttctccacaccttatgccagcaacccatgaaccttcactgtggtcatagtctgtgccagaaatggatttgtatgttctgtcatctcacctgggaggccaaccccaaaatacagcaagcaagccaaagacaatgtcattcccaaattccacttcaacaacctctttattctccccttcttttttggggaccagcatcctgacaatagccattaggtgccctatgtgaacttgggcaagcatcttaatgcctacattttctcatctataaagtgaaacagctgaaatagatcaatggttttcaagcctttttgtcaacctaaggcttataaacagaagcccacaagataaagcagaaactcatcgctgccccaggccaagtgagatgggggaggggaggcctggagccccaaatgctctcagaatactctctccccactgaccaagggtcttattcttggatgagaaccccaaggagcacagtttaaaaacactgaggttttccttgggtctcttcaagtgccaacaatatgattctgtggctttatggggtcatcagccagtgctgtgaccaaacacataccaacaacctctctttccagagaatcaacttctccttgtaaccttcaacctctgggctcagtgtctccactgctatgcaatgggttgaggttatggccactcagagcttaatgtgagactgccccctgatagcctgggcttggcccaggagaagtcaccacaccataccgaatcatttttcttatttgtgaaattgaggacaaaatcactaaccagatagatcagggaggctggctagggaagttttatcccctagagtaaaagcagagggagttaggctagtgattgggttaaacagctccatcctggcagctctgtggaaatgcattcacaggtttcaccccatggggcacatcacccagaagttaaatggcttataatggccaagggctggttaagtccaagggcggattttagaaaatcctgcctggagtgacaggctgctcgcacattgaaaggacactacctccagggatcaatgacttttcgtggccttgaaattcacatagaagcagggcgtagtggctcacgcctgtaatcccagcactttgagaggccgaggtgggcggatcacgaggtcaggagattgagaccatcctggctaacacggtgaaaccccgtctctactaaaaatacaaaaaattagcaggcgtggtggcaggcgcctgtagtcccagctactcgagaggcttaggcaggagaatggcgtgaaccccggaggcggagcttgcagtgagcctagatcgcgccaccgcactccagcctgggtgacacagcaagactccgtctcaaaaaaaaaaaaaaaagaaaagaaattcacatagaaataaaatgagcagcctgctttgtctggcagggctaattggaggctgctgtccacatttctccttccatactcctgtagctcagcctgcagaggctctaatgctggaaaccttgggggcctgcagggagggacccggtcaggctacccctcggttcccaatgcacagtgccaggaagggtcatttcatccctgccccgctatgcttgctcaggtctgagacagtggggtcagccccctgacagcacctgctgactgcagggcccctcctgatggcagggtgaccaagagttacccctctctggaagaaccagctgaagttgggtgtttaatgcagccacagatcctgcctcctatactcagaaaaggctgaaaagcattcccatctggaaattagtccgtagtttctagacgtggtaataatgtcatgtaaatacagctatatatatacatatacagggatggaaggctggtttttctccaccggattgttagtctcagccgcttgcctgaagccccttgttaaaccgtaagggaaatgatgccacctgctgtcatttccaggaactgcactagaggctattttggattctttctgctttgcaattcaaatcaatagggttttatggagcatcagctgggtccccagtactatactgtgtttaaggggcagggtccactgaatttccacagacttcagaaatcagtggtcagctggggaagagaagaactaataatattacatgaagtgagctttatcagcaaaattgttgctgcagtttctaaaagtttctctgaaaaccccagcccgtgtgaaatttccctgtaaagcacagaaaccaagggcacttccattggggctggaagctctttatactcatcctagataaaaagctccttgaaagactgctataggaacatacccgacagtgaagacacatggaggcagaggcagcaggagtccttagaatcatttattcccgcccagctgcatcttggtagaggaggctgaggccaagggcttcgtctggctcctgccaaaactagaattagaaggagtggggatcctgtaagtccagcccatgctctcccttggtgttgggctgtaaaaagatcacgaggagttcagttgggtgagcctccctccttccatcactaaaacacaatcatctcacattataaatatctcagaatcttcctaagagatcagtgtagttcttcttattgttcaggaaaattagtacatggggtcaaggagcaggtcatacacattggtctccacactatggggagatccctcctctgccttggcctctgtccaaccacatggaagtcatcctcttccttttcttcatcatcatcatcctatcactgtcaccattctcacatgtttgtggggattttacgcaaaacacagagttaatatttttacatgatatggatcccgaaggcagacaagattcctggcattcattcatcacaaaaatatctacaactaacagagagtacgtatgattatgtaacacatgcatcagccacggactgctcctgccaccgagactgaatcatgctcatctttgtatgacccacacaatgtctgggacgtagtaaatactcagtaaatgtttacttggttaaaaagaatattcaggctgggcgtggtggctcacgcctgtaatcccagcactttgggaggtgggtggatcacctgaggtcaggagttcgagaccaacctggccaacatggtgaaaccctgtctctactaaaaatacaaaaactagccaggcatggtggtgcatgcctgtaattccagctacttgggaggcagagacaggagaattgcttgaacccaggaggcgaaggttgcagtgagccgagattgcgccattgcactccagattgaggaacaagcaggactctgtctcaaaaaaaaaaaaaaaaagaaaagaaaagaaaaagaatattcaaatattcaacattttggaaaatcataatttataaatcatgccatcgatgggattttccaaaatatcactgggtccagggaggaattccagtcatacctctgtcatcctggtctggtttcttgttgtgtgtgtgacaaacaggatggtaatttttgccctttgtctttgaaatcccccaaattgttgattcacagtgttgaaggtcatgaggtgaagatcttgctcagatatagttttccttcataacaacaatgaagtcactcttcctgggagagaccttctgtgttaaggatgtcggcgctgacttctctaattctgatttgaagatcttgctgtggtgggatgagggagggagggggaaagttcacgtcgcccaggccctaatgaagtatgtgggctactgaactaatgagaaagtggcaacaccaacttctcttctccttctgcctgtggcttttgggttccaaccagaaccccactttcctcaccttacttatctggttgttttggttgatttgctccatagaaatcaccacccaatgcgagccaccctcctaaattcaaggtcaagagctcgcctctgattgagaagcttcaggtaagtgcagaattcattgtctattgctaccttttatctaactccacttcttatccaaaatttgcatgactttgaggctcataggggtagcctatgtgtcacctgcataattggccccaataatcagccagtgatcaaattgcagtaaacgataaggatctcacagccctgcctgagggaaaagaactaacataaggaccacatcaagcacaagctcatgtatttgacatttagtggtgggggttgatgggtaacgggatacctcaagagtctgtatggggctgggctcacccctataatcccagcactttgggaggctgaggctggaggatcacgtgagcccaggagttcaagaccagactgggcaacatagtgagacactatctctacaaaaaattttaaaattagccaggcatggtgatgtgcacctgtagtcccagctactctgaagaccgaggtgagaggatcgcttgggcccaggaggttgagactgtattgagctgaggtcacttcactacactccagcctgagtaacagagcaagctcctgtcttcaaaaacgaaaagaaaaaaaaagagtcttacgggaaaggacaccatagttgccataaacactttgaaatagccaacgcctctctcccaaggcctgaatgcagccacaaaccatttcagccctgcatagggctggtgttcagttgctgcacactgcaccagtctggacaaatttgttatttgggaagtatcctgtccaacctctccaccagtaaccctgtgtgcccagagccctcacctcccgtgcccagggctggctggctccctgggactgtaattaagcagaagacactggtcctgaactcacagtcttgtggagacagagctttcacaggtgatataataaaaggagctgatgccagagatctccactgtgggtcactgcccggctcctgctgctcaagaccagggtttctcagccttggcattactcgagctggatagtgttgttgcaggggctgtctcgtgcacggcaagatgttcagcagcatccctttcccacccattgatgccagtagcactctccaacaagttgtgacaatgaaaaatgtctctagacattgtcaatgtcccctggaggcaaaattgtctcccaccccagatcccaggtgagacccaccattctagaatttcagagcaagaagagagtagagtgggccagagtaattaatgaatgttttatgaaacacctatgtcctgagcccgtccttaaggaatgcgtggctgaaaaggtgggaggaagatgttccccgtgggggaatggcagaagctaaagtgcggaggagaggcaggcatgttatgtccaggtgggggctgtaggagaggttcctgttctcaccccaccctctgtccagccacccaggagaaggaacaaggtgcttgtgcaccatacctcccatccaggcccaactgagagcaccggctcaccaacttcattctgaaggcatcagaggtgtcaagacgaatagccacagcctctgtacttcccagccatgggagagcctagggatttggatcccagcctgactgggggttaaggcaagcatctctggtttctggccatgagcctaccctgtggagggtggggagggctctgcagtgtctacctgaaatttaattcaaactgagaagccctgattccacccggctgcaggaatagggtggtgctacctgtcactccaggaggctgcagggctcctaaataagtaacaggggtctctcagaagggatcccagaactccagcacccctcctagcatccagctgagggatgtagccccagactcctacctctgcctccctgtagcccaccctagccctcattcaagtgccagaaaccagttaccaaatgttctgtaccctgtagttttggacccattcctttttccagtcattaatgagtcttttggggaaacacaacaacttgagaatgtggtttggatgtctagttgttcaatctcattaagattgtcagcaatagaatgacaacttagccaaatcccacaggaaacttacttcgttgggaatatgtgggagaaacagctaagaaatgcgtcgccagctagattttcttctaactattctactgaatgaattatgaactagggattttcttttttaggatagcccaaaattcacaattcaacttttctgctatcaacatccattttatttgcaagcagtcttacagagggaatttctctgcttgaaatttagagaagagcatttcctttaaggtccagtgaaccccctctgccatgaagccctctcagccatgccagcatatcaacctgcacggcaactatgctccaaatcctcccctgggtactccccatatgccgcttttttttttatttttattttttttagacaaggtcttgctttgttgccctggatggactcaaagtctcaaactcctgggctcaagcaatcctcccacctcagcctcctgtgtagcagggattacaggcacacaccactgcacccagcttcatatgctgctttttgacatggtttgggctagtatgctatttaactttcgtattttatatactgaactcttaccatgactcagtcttgtctgtatgataccttctttattaagatcacaatgaaaacactaacacccttctaaacgtgtgcaatgctttcaagtctgcaagtcctaaagtatacataggagttctccaggacagcagagtctggctggtaggaggtgggaaggtggccaaggggagctgggagggagagggtgtgagtatggggcaggagagagtacacagggaccagatagaaaagactttggaagtcaggccaaaaggtttggacagacaaagaatctgagattcggaaaggctgttggacttgctgaaggcctgaaggtcacactgctattaagtgaaagatccagtatttaaagtcagatctgtcggtatggaaaacccatgtacttcccattgcaccgtctgcccctcacactccatcccttctctgtgaagtctcaaagaggctctgtctcctggttcggcactgccacagggtctgcaggacgcagctctgtggtgatttgggaatgcagagggcaggagaagcaccctagatggccttaaagaggatcggactctcacgcacgttctccccatggacgccttcgggcatctgggaccacctgcctcctccccaaccaaactcaagactccctgaggctttcgttacctttgggtgactctcccatttggctgcctttcattttgatcgggtcacacctgtaccttgataccccaagtggtggctcatactatggtgtgtcccactgccttcgtcctggagctcagtggcctactgtgtccaccactctgccgtctattaagagggaacctgatacctggaggctgagggagaatcagacccggtgtgaatctcagggcagatcccttagctactttcttgattgtgcaatgagaacacagctgaacgtgtggggttgctgtggaggacacagctacatgtgccctgcaatagtaggcatctagtgggagtgagtactattgactctgatgagaaaggggatcacagagcctgacttcctgtgagatcctggtgccacaggtgctcctggcagttgctgcttcgccactttgttgataagttgagcttgttctgggaaatttttgttggatcctcgtcagtgctggctgagcattttggaatgcagcctgtggcaagccaggtagcagaggaggatagagtaggcaatgcttccaagagcaggccatgatgggacagtggataatgggttgggaagtagcatgaaaagcctggtgttacctagtctcaaccaggcctgaggccagataaccaacaagctaaagtagaggctctgatcttctccctagtcctatttgaaattgttcatcttttcttgacaggccaatttaacctttgacccagctgctctactgcctggggcctcacccaagagtcctggactcaaggctatggtgtcgccatttcacagcccaccttctacccccagcagccctggtgtgcgatctaggcccagcgaggcagaggaggtgcctgtcagcttcgaccagccccctgaaggcagtcatctgccctgttacaacaaggtaaattctagctccagattatggcggtgtgtctgtggaaatgtgggcactggcacccctgaattttctctaccctgttgtcctggagaaaggaggaaacattcggagttactgtcagagctgcgtgttaacccaagtgaaatttctcctctcctttgcaaatgatccctgaactaggatcacctttttcctcgactgactggctcatctccccttgctgtaactgtgccattcaaccccaagacaagcctgggggatggcgtgctctctcctttgtggagaaaggtatggaaattcaggattgatcccagctgcatagttcattaatgtcaaaagctgaacgcaaaagctaaaggcctgatcagtgatttgcacagaatgctgggcagcatccctagaactccaaaacgtcctgtctggcctggtgtgaatagccctaagtgtcccagtgtggactcaaatcattcttcctgcagcttgccccagttaaagaacatccaaactgttccctttgcaaaaatgacatggcagggtgcatttctacagatgcaaccctgatcctctgtgtgagctttcatcacatccctcgccctgctgggaggaggtaaggatcagagataggggccaagcaggtagccaacaaatgtgtgccagggccaagcaggggccaagacttcttggggtctggtgccagagaatgctaaatgggtgtggcttaaaattaatgatggagaaatgagatcttctaggccattctaggaagtccagctagcaaaaaaaaaatcaaatgtgtaaaaacagggaggactcaaggaaataaactagtggtaaggaggggttcaggcaggcttgagcctgccggctagggccagagtggaagtcccccagccagggtgatggagacccctgaaggcagagaggaaccttcagagagagccgcatcttctcacagggtgaggcagggagggaggagctgctgcctggtcataatgcctggaggcttcagccttctgacagcagcaagaggaagttattttggaaccctgctggtcatgagggctggggccttgataccttccagagctggcccaatcatggtctcaagaaagggcttgggaggccctgataaaccaagtattcattccatacttcttagatggggaactaggattgacaaataccaaaatgtaaatcagtgggaaaataacatttacaaaaatttattttacacactaattttttttttttttttttgaggcaaggtcttcctctgtcacccaggctggagtgcagtggtgcgatattggctcatcgcaacccccacctcctgggctcaggcaagcctcctagtagctaggactacaggcatgcaccaccacaccttgttttgtattttttgtagagacagggttttgccatgtcttcaaccaggctcctgcagcttctgggctcaagtgatctgctggcctatgcctcccaaagtgcgaggattacaggcgggcaccaccacacccagcccacttatatactgatttttaaaggatgcatcactctagtaggtagggtatctgatgtgaacatttccattgcacctttgactaagtctgataagctgagaagaggcctgattctgagaatcacatgcttcccagagagatcaccttcaggcagctctgctggtgctcctgagaaacagcttctgacagtggtggacctgagttctagaagcaaaggaatctggctgctcaggtttcccagtatccgccaacttcacgggggcaggaaggacagagttaggcaagagaggaagctggtcaccaggtctccagctcagcacccctgaggtccctgcaccagggcctggccgtcagcaggtctctaaccctcttctcggtgcgattcatctttgtcaaagtataattttcaaaagtacaattttcaaatttttcaaaattttacagtgcaataaaatcataagttatcttttttactggataggaagcattttgcatcttcacaagataaaagtctgactcttatgcaaaatagagattttattcaatatgtcaatttatgaggaaacttgtaagatggtaaaacttagtcaaacagcatttgaagaactggttatttatagataattagacaatttcttttttttttttttaatgcagggtctttctgtgctgcccaggctgaagtgccatggtgtgatgacagctcactgcagcctcaatctcccaggctcaagctatattcccatctcagcctcccaagtagctgggaccacaggcatgcaccagcacccccagctaatttttcttactttcagtagagatggagtctcgctacgttgcccaggctgatcttgaactcctgagctcaagcgatcctcctgcctcagcctcccaaagtgctggattacatgtgtgagccaccatgcccggcaagaatttttttttaagtgtcagaataaaattactaaattagacaccgaactgattaatgttttacagtgcaataaaatcatgagtttttgtttttgttttttactgaatggaaagcatttgcatcttcacaaaataaaagtctgcaggtcaccatgtgatttcacaatcccacatggctctaatctataataaatagcaaacaatgattcgttctcctggaaaattaaacggtccttgcgtggacttgtgaagcagtgcaccagactgacattgaaagtgcatacagtcctcctcttggcctttttttatgagtttttggataactttccttaacactttcttctaggtgcggacgaggggctcaataaaaaggcgccctccctccaggcgattccgaaggtcacagtcagactgtggagaacttggagatttcagggcggtggagtcatctcagcagaacggtgctaaggaagaggatggggatgaagtgttgccatccaagagcaaggccccaggatcccctttgtccagtgagggagcagcgggagagggagtgagaaccctgggacctgctgaaaagcctcctctgaggaggtcacccagcaggacagagaagcaggaggaggacagggccacagaggaagccaagaacggtgaaaaggccaggcggagttcagaggaggtggacggccagcacccggcccaagaggaggtcccggaatcgccccagacctctggcccagaggcagaaaataggtgtgggagccccagggaggaaaagccagctggagaggaagcagagatggaaaaggctacagaggtgaagggggagagggtgcaaaatgaagaggtgggacctgaacatgacagccaagaaacaaagaagctggaggagggagctgcagtgaaggagaccccccacagtccccctggaggagtgaagggcggagatgtccccaagcaggaaaaaggcaaggaaaaacaacaggagggggcagtgctcgagccaggctgcagcccccagaccggccctgcccagctggagaccagcagtgaggtccagagcgagccagcagtccccaagccggaggtaggtggcctggctcgttcacatgcagaaggcagtgccagggccagtgtgtgcctctgtcacatgtcctgttccgtacagtcccttcataaatcagctcgacatgcagaaacaaaggtgccaggctcctgcctcgtgccaacttgttggagaaaggctgtcgctgaggctgaggggacaaaaggacacaaagaggaagtgtgtcttctgctcttgccaacttctcgctgacttggagttctggcaagcttctgggtgtgtgtgagtgaccgagcctcggcacggctcagtaactgaggcctgcaagcatctatggaagcctgctgagtgcaggagcctgggcatgctgctgcaggggatccagagatgaaaaagaaaggggagctcctttctaaaaatcatctcagtttagcacatgagaccagcaactctttcatgtgcatgaacaaggtggaatagggcagtggacagggggcattcccagggaagcccaaagtgcaagtgtagcagaaacaatttgtgtgtggatgggacaaaaagctggggatgcttcagggccaaggtagtatttgagttggccctcagagaaagaagctgcatgtgatgttgggacgttcactctctctcagggattgggcatctgctgcacatgaggaggacggggtgactcagtccctgccctcctgcctgggcctgcatttactggccctttcctctacacctgtctgctccccaccagctcccaggaagcccatcttgagctcacctatctatgctttaagagcagaaccagctctgcagagtccctaacaatctcatcaagtcagtcacccacaattgtttcacccgtcgcttttgttagtgcattcattcattcatgcgttcatttactcacaccactatcagcttcctgctacagtagcctctttgtttgtttgtttgtttgttttttgtttttgtttttgtttttgttttgagaaggagtctcgctgtgtcgcccaggctggagtgcagtggcgggatctcggctcactgcaagctccgcctcccgagttcacgccattctcctgcctcagcctcccgagtagctgggaccacaggcgcccgccaccacgcccggctaattttttgtatttttagtggagacgggtttcaccgtgttagccaggatgatctcgatctcctgacctcatgatccacctgcctcggcctcccaaagtgctgggattacaggcgtgagccaccgcgcccggccttacagtagttctggcttcctgcttccacttttttttccccctgcgtatataatccattctctggacagcaaccagcaggtttggtttgttttttagatcaactgctctttgctaaaattattcgcctcttgtatcagggtcgccataaaaaattaccacaaacttggtggctcaaaacaatagaaatatactttcttacagctctacagttcagaccttcaaaattaagttgttggctgggttggtctcctctagcagttctgggggagaatctgttcctctcccttaagttctggcagctgcctgcaacccttggaattctcccttgcctcctctggctcctggtggctgctgcaattcatggcatctcttggcatctagatgcaccactccagtctctgcctccatctccatcacacggcctttcactgttactgtgtgtctcatagtccccctcctcccccttataaagatgtcagtcattagatgtagagtccaccctaaatccagaatgatcttgtcttgagattcttagttacatctgcaaagaacctttttccaaataaggtcaaattcacaggtactatgggtttggattggatgtacccacctctccctgactctccccctcactgtgatccagccatgctgaggtctttttgttcttccaatacagcaagctcattcccacttcagagctctatccttgctgtcccctctgtgtgggacattccttctgatccttacagggccgcttcttacccacggctcagagctcagctcagatggtcccttctcactgaggcctgtctgtgccactcagtctaagtggacctccctccatcccatcagttattttctcccacgattctacttttatcatagaacacatcactatttgaaattctcctgtgtattttttaattgtatttctctactccttttcctcactgcatctccagcacctgctacagaacctggaacatagtaggttctttaaaaaaatctttgttgagtgaatgaatggattttaaaagaagacagaaaattgtctgacccaaaagaaataatctctaatgatagaagtacaggtagaagaggaactgatgtgtttaggggatctcctggggccctcacgttattctcactcatgctagatcagggagaaaaatgtgtgagtcccaaagactcataaagtatgactgagacccctgggttaagttgttaggcagaggtgctccagatttctttaacatcttccattccagtgccaggcgtggtggctcacacctgtaatcccagcactttgggaggctgaggcgggtggatcacaaggtcaggagatcgagaccatcctggctaacacagtgaaaccccgtctctactaaaaatacaaaaaaaaattagccaggcgtggttgtgggcgcctgtggtcccagctacttaggaggctgaggcaggagaatggcgtgaacctgggaggcggagcttgcagtgagcggaaatcgcgccactgcactccagcctaggtgacagagcaagattccgtctcaaaaaaaaaaaaaaagcacaacaacaacaaaaaaactttccattctaagtaagcaatctttacatttaggattttctggaactgagagattccaccaggtctagagaaggcaaatacatgccccaatctgttagtcctttttgaggatgaagtcactgggtccaagtagtcacctgccagtggttgctacatcttattttcaggttaggagacacctgccttgccaagagacctccccatctcactgacagcatcttccaatcctgaagggttgaaaagtcactttggttgaaaagctagtagggaagagggctgcttcagggaggtctcaggtagaagaagtcttcctgcgggaactccaggagctctggggcaggctcactggtaatctctcaagccttgccacttccgtattcccaacagagccttgggcaggggaagagaatgcccagcaacctcaagagcactctcctcccaaataggcagctcagatggagaaagagtagctccacttccatctctgaatggaatgagaggaatgcttttcctctcggtcatctctgagatgccaaactttgacgccacttaacccaattgcctagtttctttctttctttctttctttctttctttctttctttctttctttctttctttctttctttctttctttcttttttttagatggagtgttgctctgtcacccaggctggagtgcagtggcacaatctcagctcactgcaaactctgcctcccaggttcaagtaattctcctgcctcagcctcccaagtagctgggattacaagcccgcaccaccatgccaggctattttttgtatttttagtagagacaaggtttcaccatattggccaggctggtcttacactcctgacctcaagtgatctgcccacctcagcctcccaaagtgctggcattacaggagggagccactatgcccagcctagtttagagagagaaagaaaccaaggctccaagagaggacaggagttgtccatggtcacagagctcagtcaatgttgacatattaggcacctgcccaatcatcagaataaactgcttacaaagtacctgtgcacgtgtgcataatttgtttaatctggaagagggcactgtctccagtcctccctgttcctcttaaaccaggtcaaggtcagaatcaaaatgcctgagtcactagtgcaaaaggaaccatcagtaagaacaattacaaggttgaccccttgagttatgggcttcctcaggcacccatgtctgtcccaggtctttcctggatcccccagaggcagcacacacctctaagcagttttctaaccccctaacctaattcccatcttgttcctctgtcggtagaaatagattgatcagacaaactaattatggttgcattcatgcaatcagcatttaacaagcacccgttatccctaccactatgtgagatactgggagtcaaaagtgaagaagacagaggcataaacaaataacgacaaggcagtagaataaatgggattctgccctagaagggtgctatgtgaagcacaaaggctggagcaatttgttcttcgagagaaaacaggggaaagttccataagtgcgccaaaggcatcagacgtgtgaaagcactataaagggtcaccttactgttaggttgcccctcacaagtgttttaacatatcgtactgaaagaaggagtcatcctggggatttcaatcataggcaagctggacgtatcaagtcactgcacttaggattctgtttataaggaaaagtcgccctgaaaagagggcacagaatcagatacaactctaatacttaaaataaatttagcaagtgttatctgggcgtggtggctcacacctgtaatcacagcactttgggaggctgaggcgggcagatcacttgaggtcaggagttcaagatcagcctggccaacatggtgaaaccctgtctctactaaaaatacaaaaattagccaggggtggtggcgtgtgcctgtaatcccagctatgcaggaggctgaggcaggagaatcgcttgaacccaggaggtggaggttgcagtgacctgagatcgagccacttcactctggcctgggtgacagagactccgtctaaaaataaataaaataaatacataaatacataaatacataaataaaaatttatcaagtgtttctcaaacactcattatgtatccagtattgtgtagggcactcagctatgccagagactaacttacccaaacaaagacattcgaaatatttggatatcaaatctgagactttgctgtattaacaataagtgccgacttcctaattgcctgattcaattgctttccaagtcattccccttggtttctcaacatttgatttgaaattcttttctccctgagctgatgaaatacatccttctcttgagaatcccctacctttgtaactttgtagtgttaacattgttctttctttcttctccctcctggttaactggcaggtcaacagactcagttcttggccctatttcttctcagttcttttggggacacactccctgcattcccacctcaatcatccctcagacacattaactgtccttgccagagatccctctgtctctcctccttttcccctttcccacccaccgctcctccttgaccctcctcagccccgagcatgaccagcgctttgtgggagctcaatcaataatggaattgtgaccaggcacagtgcctcacacctgtgatcccagtattttaggaggccgaggcatgaggatcgctggagcccaggagctggagaccagcctgggcaacatggcacaaccccatctctatgatgataccagtgctagcctttcttttctatctctacaatcacaactcattcctaacagaattcctggtttccagactcaccctacacatcagtgacaaatgcctcttcctataaataccataggttgtctgctctcctatcccaaaccctttgatactgcccactggaaaatggagttcatgctcctccatgggctgggctttgccacatgcctaaccttcactgtctccatgctccccaatagtggggccggggctccagccagcctgcaccctccaccattctgcattaggcaaggcatctcctcacccactcccacagcctctttgcccaaatgcctgcactgccagctgaaattgcctgcagcccactttaacccagccctcactggtacctggaagtcctctcaccacacctctatcttcccctccacaagccttttctgattgctctgaggacaaatgcccccctgctcagtataatccactaggatggtccacatcacaccccaccttgtactgtggttacattcccaaatgtttccatttctcagcaaaagaactgatggggacgaggctggagtcctggtacagctcctagcacagaaggatctcaaagtaataccttcggaatgactgttgaataaatagctactttactgtccttttactcaagtattggtcttttattttcaactctttctgtcctttttccatttatatgctgcctaagaatcttgagcagtgtttcaggagagcacattgaatgggaatgagtgaataggtaagaggccaagatagagggaactcaggcatcaagggtgggcagggtcacttagtactggacaactcaagctctgatccctgggttaaaatcctgacttcaccacttactagctgtgtgacctaggggaaataacctctctgtgccttcattgcctcacctatgatagagttaataaaagtaactacctcatattgcttttgtgaggattaaataagtcaatgcataaaaaaaactaagttgggcacatagcattcttatgactatcattcttactattactcctactgttactattattgccagatccatcatccccaaggagggatgctgagtgtcaggatttcctcaccattttcctaattaattctttcctcccctgttcacaggatgacactcctgtccaggacactaaaatgtgaagaacagctcattgtgccccagtgatgaagttgctggacacatctctttgcaggtagcagcaacagttgtagcagcagcagacgaagccattgcagaggcagaatatgctgagtgtctggagtcagcctgaagacacagggtggattatttcctggcctccacaccaaacgttcccttgcagatggagactgaatctgagggcagcagacttttatcagcttgagtttatgtcatttgatggacttggttcaacaacaagaacttacttaaaacaatgtactgtggtgatgagtcccaggggcactggtcagcctgtggagccctggatgctatccacacccacctatccctgcagctaatttagctgatctctaatttaactgagctctaatttagctgatcagattttgcttgggtaaagttcctttttaatgttctaaagtgtttacggttctcaaatatcagttaaaaactaattttaggtggccataaacataaaatagaaaccctgtaagttacagaagaccctaaattgtatcaaaaccctagagacaacttttcaatttgatccaaatttgaactggccaaccagtctttaaaacactggactagaagagataatgattgaaacatttaaaaaaaaaaagtgctccattcgcaggagcttttcctgtcctgtggttttccagttggtgaccaccatgggaggtcgctggctcggctcactcccttctcccacccttgagaatgtggagaactcccatggagaggcagaatggcaggaggtttcatgtcccgcgttgcatctcctcctgaaagaaaagcagtgatacctgaataatgctggctctccgattgatcctgtgaggatgaatttgcatttccagaatccttgagcatggattagatgtttcctgggaggtgccttgagtaccattatgtgcaagctacataattaaaacatttttcttagtttccctgggaagcttttcttgactcacagcccaggttcttctgcccaacacaaaaggagtgagttggggtctttagtctcttcttattgggtagctcttgctttaatattctgtttggtgagtgtaagggattctgcaagggacagggggcctgactacccagtctttgacttgtatcctctcccctcttcatacactcctgctgaaaaatgttaatccaaatacacatttaaacttagggtcggtccttattctgatttgagtattttaatgtctcagtgtgctgatttggtagttggaagaattattcttctggaggtctgttagactacatcctacactgacttcagaaaacagtctgtcagacaaaaaggccttatgtcaccactggtacctcagtttcctcatcccatttacagtttttctaactccagggtagtgtttagtgttaatatttgggatatattttttttcaaaactgtttttaagtagtttgtaatttgtaacaaacttgtaacctggttgggactgatattgtcatagctatgataaactttggatattagcagaatttgggagatgtgtgtgtcaattattttgagatctataaacttgtctgtctatctatctagctggctagcttgctatcaatctagctaccatccatttattgacagagaagtctacccctaaacaatacttggttttatttatatatgtctttgggttgtttatacacatgcactatctgggcaagtactttgtgaatatgtgcatgattgtgaatgtgtgatgaaaagggccactttacttgaggaaggcatggaacagaaagtatggggtttagatatgaaaaatgaaactgcatttttcttctggagggtctaaacatagtagcagacgagagaggggcagtaaaaatgacaagaatgtgacattgcggcaccatgcttgtgggcatcagaatacctttctatcccccaagtctcctgttagtcacattatttggtgtattttgtgaaaaaaatagaggccccattcccagggcttgttcattaataaagggggctcttggcagggaactcatgaagtacagggactgatttttgttggtgctgcagccccactgcttaaaactctcctttctcaaagcaaccatgatcaggtgttttatttgcatggttgatactggaacttctaaatttgggattaaagaaattcatctgtgtcttaggtagcacaaagttattaacaggccaggaagaccttgtttctttcaggcttccataatgggtttgaaagaaaacacggattcttctacagcaacagagttaaagaaatagtcatagtcattcttccacgatctttgtagtctagcttgaatttcaaactgtgtccttccttactccagagagggagcaagaaaaaaaacctggatgctttgaagggatctgccactatttaaaaggggattaggattctgtttcagctgcatgtggaactaggtaagcttcagtggcctcagaactccaggcccctcacggagatcaccctgaacaatgcccagtttttcatgcaggttttgtcctatgaccagttaactacatgttcaataaataaatgtcaaagaaataaatgcgtgaaaaggcaaccagttcatcatcttatgattaggttttcttgattagggatgtgtttagtacagctgaatgaacaagttcacccagct

SEQ ID NO: 295 - DNA, 3163 bp, Homo Sapiens
cgaggggctcaataaaaaggcgccctccctccaggcgattccgaaggtcacagtcagactgtggagaacttggagatttcagggcggtggagtcatctcagcagaacggtgctaaggaagaggatggggatgaagtgttgccatccaagagcaaggccccaggatcccctttgtccagtgagggagcagcgggagagggagtgagaaccctgggacctgctgaaaagcctcctctgaggaggtcacccagcaggacagagaagcaggaggaggacagggccacagaggaagccaagaacggtgaaaaggccaggcggagttcagaggaggtggacggccagcacccggcccaagaggaggtcccggaatcgccccagacctctggcccagaggcagaaaataggtgtgggagccccagggaggaaaagccagctggagaggaagcagagatggaaaaggctacagaggtgaagggggagagggtgcaaaatgaagaggtgggacctgaacatgacagccaagaaacaaagaagctggaggagggagctgcagtgaaggagaccccccacagtccccctggaggagtgaagggcggagatgtccccaagcaggaaaaaggcaaggaaaaacaacaggagggggcagtgctcgagccaggctgcagcccccagaccggccctgcccagctggagaccagcagtgaggtccagagcgagccagcagtccccaagccggaggatgacactcctgtccaggacactaaaatgtgaagaacagctcattgtgccccagtgatgaagttgctggacacatctctttgcaggtagcagcaacagttgtagcagcagcagacgaagccattgcagaggcagaatatgctgagtgtctggagtcagcctgaagacacagggtggattatttcctggcctccacaccaaacgttcccttgcagatggagactgaatctgagggcagcagacttttatcagcttgagtttatgtcatttgatggacttggttcaacaacaagaacttacttaaaacaatgtactgtggtgatgagtcccaggggcactggtcagcctgtggagccctggatgctatccacacccacctatccctgcagctaatttagctgatctctaatttaactgagctctaatttagctgatcagattttgcttgggtaaagttcctttttaatgttctaaagtgtttacggttctcaaatatcagttaaaaactaattttaggtggccataaacataaaatagaaaccctgtaagttacagaagaccctaaattgtatcaaaaccctagagacaacttttcaatttgatccaaatttgaactggccaaccagtctttaaaacactggactagaagagataatgattgaaacatttaaaaaaaaaaagtgctccattcgcaggagcttttcctgtcctgtggttttccagttggtgaccaccatgggaggtcgctggctcggctcactcccttctcccacccttgagaatgtggagaactcccatggagaggcagaatggcaggaggtttcatgtcccgcgttgcatctcctcctgaaagaaaagcagtgatacctgaataatgctggctctccgattgatcctgtgaggatgaatttgcatttccagaatccttgagcatggattagatgtttcctgggaggtgccttgagtaccattatgtgcaagctacataattaaaacatttttcttagtttccctgggaagcttttcttgactcacagcccaggttcttctgcccaacacaaaaggagtgagttggggtctttagtctcttcttattgggtagctcttgctttaatattctgtttggtgagtgtaagggattctgcaagggacagggggcctgactacccagtctttgacttgtatcctctcccctcttcatacactcctgctgaaaaatgttaatccaaatacacatttaaacttagggtcggtccttattctgatttgagtattttaatgtctcagtgtgctgatttggtagttggaagaattattcttctggaggtctgttagactacatcctacactgacttcagaaaacagtctgtcagacaaaaaggccttatgtcaccactggtacctcagtttcctcatcccatttacagtttttctaactccagggtagtgtttagtgttaatatttgggatatattttttttcaaaactgtttttaagtagtttgtaatttgtaacaaacttgtaacctggttgggactgatattgtcatagctatgataaactttggatattagcagaatttgggagatgtgtgtgtcaattattttgagatctataaacttgtctgtctatctatctagctggctagcttgctatcaatctagctaccatccatttattgacagagaagtctacccctaaacaatacttggttttatttatatatgtctttgggttgtttatacacatgcactatctgggcaagtactttgtgaatatgtgcatgattgtgaatgtgtgatgaaaagggccactttacttgaggaaggcatggaacagaaagtatggggtttagatatgaaaaatgaaactgcatttttcttctggagggtctaaacatagtagcagacgagagaggggcagtaaaaatgacaagaatgtgacattgcggcaccatgcttgtgggcatcagaatacctttctatcccccaagtctcctgttagtcacattatttggtgtattttgtgaaaaaaatagaggccccattcccagggcttgttcattaataaagggggctcttggcagggaactcatgaagtacagggactgatttttgttggtgctgcagccccactgcttaaaactctcctttctcaaagcaaccatgatcaggtgttttatttgcatggttgatactggaacttctaaatttgggattaaagaaattcatctgtgtcttaggtagcacaaagttattaacaggccaggaagaccttgtttctttcaggcttccataatgggtttgaaagaaaacacggattcttctacagcaacagagttaaagaaatagtcatagtcattcttccacgatctttgtagtctagcttgaatttcaaactgtgtccttccttactccagagaggga

SEQ ID NO: 296 - protein, 255 aa, Homo Sapiens
RGSIKRRPPSRRFRRSQSDCGELGDFRAVESSQQNGAKEEDGDEVLPSKSKAPGSPLSSEGAAGEGVRTLGPAEKPPLRRSPSRTEKQEEDRATEEAKNGEKARRSSEEVDGQHPAQEEVPESPQTSGPEAENRCGSPREEKPAGEEAEMEKATEVKGERVQNEEVGPEHDSQETKKLEEGAAVKETPHSPPGGVKGGDVPKQEKGKEKQQEGAVLEPGCSPQTGPAQLETSSEVQSEPAVPKPEDDTPVQDTKM

SEQ ID NO: 297 - DNA, 3416 bp, Homo Sapiens
cgaggggctcaataaaaaggcgccctccctccaggcgattccgaaggtcacagtcagactgtggagaacttggagatttcagggcggtggagtcatctcagcagaacggtgctaaggaagaggatggggatgaagtgttgccatccaagagcaaggccccaggatcccctttgtccagtgagggagcagcgggagagggagtgagaaccctgggacctgctgaaaagcctcctctgaggaggtcacccagcaggacagagaagcaggaggaggacagggccacagaggaagccaagaacggtgaaaaggccaggcggagttcagaggaggtggacggccagcacccggcccaagaggaggtcccggaatcgccccagacctctggcccagaggcagaaaataggtgtgggagccccagggaggaaaagccagctggagaggaagcagagatggaaaaggctacagaggtgaagggggagagggtgcaaaatgaagaggtgggacctgaacatgacagccaagaaacaaagaagctggaggagggagctgcagtgaaggagaccccccacagtccccctggaggagtgaagggcggagatgtccccaagcaggaaaaaggcaaggaaaaacaacaggagggggcagtgctcgagccaggctgcagcccccagaccggccctgcccagctggagaccagcagtgaggtccagagcgagccagcagtccccaagccggaggatgacactcctgtccaggacactaaaatgtgaagaacagctcattgtgccccagtgatgaagttgctggacacatctctttgcaggtagcagcaacagttgtagcagcagcagacgaagccattgcagaggcagaatatgctgagtgtctggagtcagcctgaagacacagggtggattatttcctggcctccacaccaaacgttcccttgcagatggagactgaatctgagggcagcagacttttatcagcttgagtttatgtcatttgatggacttggttcaacaacaagaacttacttaaaacaatgtactgtggtgatgagtcccaggggcactggtcagcctgtggagccctggatgctatccacacccacctatccctgcagctaatttagctgatctctaatttaactgagctctaatttagctgatcagattttgcttgggtaaagttcctttttaatgttctaaagtgtttacggttctcaaatatcagttaaaaactaattttaggtggccataaacataaaatagaaaccctgtaagttacagaagaccctaaattgtatcaaaaccctagagacaacttttcaatttgatccaaatttgaactggccaaccagtctttaaaacactggactagaagagataatgattgaaacatttaaaaaaaaaaagtgctccattcgcaggagcttttcctgtcctgtggttttccagttggtgaccaccatgggaggtcgctggctcggctcactcccttctcccacccttgagaatgtggagaactcccatggagaggcagaatggcaggaggtttcatgtcccgcgttgcatctcctcctgaaagaaaagcagtgatacctgaataatgctggctctccgattgatcctgtgaggatgaatttgcatttccagaatccttgagcatggattagatgtttcctgggaggtgccttgagtaccattatgtgcaagctacataattaaaacatttttcttagtttccctgggaagcttttcttgactcacagcccaggttcttctgcccaacacaaaaggagtgagttggggtctttagtctcttcttattgggtagctcttgctttaatattctgtttggtgagtgtaagggattctgcaagggacagggggcctgactacccagtctttgacttgtatcctctcccctcttcatacactcctgctgaaaaatgttaatccaaatacacatttaaacttagggtcggtccttattctgatttgagtattttaatgtctcagtgtgctgatttggtagttggaagaattattcttctggaggtctgttagactacatcctacactgacttcagaaaacagtctgtcagacaaaaaggccttatgtcaccactggtacctcagtttcctcatcccatttacagtttttctaactccagggtagtgtttagtgttaatatttgggatatattttttttcaaaactgtttttaagtagtttgtaatttgtaacaaacttgtaacctggttgggactgatattgtcatagctatgataaactttggatattagcagaatttgggagatgtgtgtgtcaattattttgagatctataaacttgtctgtctatctatctagctggctagcttgctatcaatctagctaccatccatttattgacagagaagtctacccctaaacaatacttggttttatttatatatgtctttgggttgtttatacacatgcactatctgggcaagtactttgtgaatatgtgcatgattgtgaatgtgtgatgaaaagggccactttacttgaggaaggcatggaacagaaagtatggggtttagatatgaaaaatgaaactgcatttttcttctggagggtctaaacatagtagcagacgagagaggggcagtaaaaatgacaagaatgtgacattgcggcaccatgcttgtgggcatcagaatacctttctatcccccaagtctcctgttagtcacattatttggtgtattttgtgaaaaaaatagaggccccattcccagggcttgttcattaataaagggggctcttggcagggaactcatgaagtacagggactgatttttgttggtgctgcagccccactgcttaaaactctcctttctcaaagcaaccatgatcaggtgttttatttgcatggttgatactggaacttctaaatttgggattaaagaaattcatctgtgtcttaggtagcacaaagttattaacaggccaggaagaccttgtttctttcaggcttccataatgggtttgaaagaaaacacggattcttctacagcaacagagttaaagaaatagtcatagtcattcttccacgatctttgtagtctagcttgaatttcaaactgtgtccttccttactccagagagggagattctgtttcagctgcatgtggaactaggtaagcttcagtggcctcagaactccaggcccctcacggagatcaccctgaacaatgcccagtttttcatgcaggttttgtcctatgaccagttaactacatgttcaataaataaatgtcaaagaaataaatgcgtgaaaaggcaaccagttcatcatcttatgattaggttttcttgattagggatgtgtttagtacagctgaatgaacaagttcacccagct

SEQ ID NO: 298 - protein, 255 aa, Homo Sapiens; identical to SEQ ID NO: 296

SEQ ID NO: 299 - DNA, 2524 bp, Homo Sapiens
cagtcccgcagccgagcgcagccgggcgcgcgccaccgcccactcgccctgtgcccgccgcagcccgaaactggccacggccgggagcggaggggacagcggggatcgtgagctccggcccgggcgagcgggtgcgtctgccgcagagtcggcacctgaaggacatggaggaaagaccggcagagaccaatgccaatgtggacaactcggcgtccccctcggtggcccagctggccgggcggtttagggagcaggcggctgcagccaaggagacaccagccagtaaaccaacccgaaggaaaccgccctgttccctccccctgttcccccccaaggtagacctgggccagaatggtgaggagaaatcaccacccaatgcgagccaccctcctaaattcaaggtcaagagctcgcctctgattgagaagcttcaggccaatttaacctttgacccagctgctctactgcctggggcctcacccaagagtcctggactcaaggctatggtgtcgccatttcacagcccaccttctacccccagcagccctggtgtgcgatctaggcccagcgaggcagaggaggtgcctgtcagcttcgaccagccccctgaaggcagtcatctgccctgttacaacaaggtgcggacgaggggctcaataaaaaggcgccctccctccaggcgattccgaaggtcacagtcagactgtggagaacttggagatttcagggcggtggagtcatctcagcagaacggtgctaaggaagaggatggggatgaagtgttgccatccaagagcaaggccccaggatcccctttgtccagtgagggagcagcgggagagggagtgagaaccctgggacctgctgaaaagcctcctctgaggaggtcacccagcaggacagagaagcaggaggaggacagggccacagaggaagccaagaacggtgaaaaggccaggcggagttcagaggaggtggacggccagcacccggcccaagaggaggtcccggaatcgccccagacctctggcccagaggcagaaaataggtgtgggagccccagggaggaaaagccagctggagaggaagcagagatggaaaaggctacagaggtgaagggggagagggtgcaaaatgaagaggtgggacctgaacatgacagccaagaaacaaagaagctggaggagggagctgcagtgaaggagaccccccacagtccccctggaggagtgaagggcggagatgtccccaagcaggaaaaaggcaaggaaaaacaacaggagggggcagtgctcgagccaggctgcagcccccagaccggccctgcccagctggagaccagcagtgaggtccagagcgagccagcagtccccaagccggaggtagcagcaacagttgtagcagcagcagacgaagccattgcagaggcagaatatgctgagtgtctggagtcagcctgaagacacagggtggattatttcctggcctccacaccaaacgttcccttgcagatggagactgaatctgagggcagcagacttttatcagcttgagtttatgtcatttgatggacttggttcaacaacaagaacttacttaaaacaatgtactgtggtgatgagtcccaggggcactggtcagcctgtggagccctggatgctatccacacccacctatccctgcagctaatttagctgatctctaatttaactgagctctaatttagctgatcagattttgcttgggtaaagttcctttttaatgttctaaagtgtttacggttctcaaatatcagttaaaaactaattttaggtggccataaacataaaatagaaaccctgtaagttacagaagaccctaaattgtatcaaaaccctagagacaacttttcaatttgatccaaatttgaactggccaaccagtctttaaaacactggactagaagagataatgattgaaacatttaaaaaaaaaaagtgctccattcgcaggagcttttcctgtcctgtggttttccagttggtgaccaccatgggaggtcgctggctcggctcactcccttctcccacccttgagaatgtggagaactcccatggagaggcagaatggcaggaggtttcatgtcccgcgttgcatctcctcctgaaagaaaagcagtgatacctgaataatgctggctctccgattgatcctgtgaggatgaatttgcatttccagaatccttgagcatggattagatgtttcctgggaggtgccttgagtaccattatgtgcaagctacataattaaaacatttttcttagtttccctgggaagcttttcttgactcacagcccaggttcttctgcccaacacaaaaggagtgagttggggtctttagtctcttcttattgggtagctcttgctttaatattctgtttggtgagtgtaagggattctgcaagggacagggggcctgactacccagtctttgacttgtatcctctcccctcttcatacactcctgctgaaaaatgttaatcca

SEQ ID NO: 300 - protein, 431 aa, Homo Sapiens
MEERPAETNANVDNSASPSVAQLAGRFREQAAAAKETPASKPTRRKPPCSLPLFPPKVDLGQNGEEKSPPNASHPPKFKVKSSPLIEKLQANLTFDPAALLPGASPKSPGLKAMVSPFHSPPSTPSSPGVRSRPSEAEEVPVSFDQPPEGSHLPCYNKVRTRGSIKRRPPSRRFRRSQSDCGELGDFRAVESSQQNGAKEEDGDEVLPSKSKAPGSPLSSEGAAGEGVRTLGPAEKPPLRRSPSRTEKQEEDRATEEAKNGEKARRSSEEVDGQHPAQEEVPESPQTSGPEAENRCGSPREEKPAGEEAEMEKATEVKGERVQNEEVGPEHDSQETKKLEEGAAVKETPHSPPGGVKGGDVPKQEKGKEKQQEGAVLEPGCSPQTGPAQLETSSEVQSEPAVPKPEVAATVVAAADEAIAEAEYAECLESA

SEQ ID NO: 301 - DNA, 37383 bp, Mus Musculus
gctcggttactaagggcgggagcccggcaagggcgccggctgcttgctgcgtctctggagggcgtcgaggcccgacgacgccatgcccaaccgcagggccagccgcaatgcctactatttcttcgtacaggagaagattcccgaactgcgccggcgaggcctgccggtggcccgcgtggcagacgccatcccctactgctcggccgactgggcggtgaggcagcgggcagttgggcagcggggagggcgcggtgggaacccagcctggggggagcccgtggaggggacacagcccaagggcaggaccaaccgacagaaccttccagaaccggggtgtggatcggacgcctcaccctcacagctcgcctctcttgtatccctcttctccccaagctcttgagggaggatgagaaggagaaatactcagaaatggctcgagagtggagagcagcccagggaaaggattctgggccttcagagaagcaggtaagggcagccacctctcgcccgcccacccttggactccagccacggtggagcccgaggaaccttcgggaagtttccagatagtgcagaagccccaggggaaaggcaggtttggggttgggggtcagggtttgcactaaacggctccccgactgcctttcagttcttaccggttagacagctgtaataataatttttaaaaagcgtaggcttttatttaaatggttcctagaaacaagcttgttaacagttctttaaatattgtaataacaagacgtgaagacctgggttaacatttgtagatcctacagaaccccccccccccccaaatagttaagcaaattccagagtattgggatagtagactactaagtcagtatctacaaggtcaataaagaagtctttttcttctcccttatgctgcttttctgtttgtacataccgaaatttcattcttaaatttgtgacattggattgaaattcaaaattgtggcaagttatttgtaaatatggtaggtagatttacattttaagttgatgtcttaagtcaggtggatttttgaggatctgtgcttgtgagctttgattgctcttatcagatttttctataaaacatatctccttaagggactagtgatggctcactggctaaaagctctggctactcttccaaaagttccagatttgagtcggtgcacccacatggtgactcacagccatctgtaactccagttcccaagggttctgatgccctcctctggcttccactggtgctgcgcacacacacgtgacacacatacatgcagccaagcacacacacgggggggggggggggggggaatgaaaatttgaagaaaaaattctccacaaaacttaagtatattgtacgtgcttgagttgtgatagttggaggcacaaccttttgtaattttcacttttaaatgaaaaccacaaataacattatagactttaggattttgttctgttttctttaaatactcttattctgcacaccagcctggcgtttagtaggtagtgactcggggaagtaagatgatagagagtgcgcaaatggctttcagctatagctacttatactcgccttcccatagagtgctgtggttggctggtatttactgataaaaataatgttttcattggccttgagggaatgctgacatagtccacgggctattttgaggttactttattacatttaaatatgggaagtaaagtatctagcaatggctctgcttaaaagtgtttgattggtgattctcttactttcagaaacttgtatctacaccactgaggaggccaggcatgcttgtaccaaaaccaagtatttctccccctgatatgtcaaatttatctataaaaagtgatcaaggtagagtattcctaaaatacttcactcaaatttggatagcatattgggcaattttttaaaaaatgttctgtatgatgtgggaggatggaaatagtgtttgccatgccatggaaaggacctgcacccatataaagagtggtggtcatgctagcttataatccctgtgctgggaggtggagacacaacagctaggcagcctggctagttagtaaacctcagatgcccatgagagatccatcacaaagaaacatggacaactcctagagagtgacactagagattggtgtgtgatagcctcactcaaggacatcaagtccccacacccatgcaagtgcatcccacccccaaaatgtgttttgttcatttgatcctacatttcaaaatccttgactatacaggtttaaacatgctagcactgatggaatgctggataaactaatttgcatttgttgaaataatactgggaagttattgtaacaaaagtctcttggtttctaccacttcatatattataaaacattagtcttctttgtagcttccatacttagattatagaggtagacaagaaggataaggcttttaacctatttcccagtctagtaagagtggattctaagtgttgaaatacaaaaacaggaggttatggattgatggatccgttaactagcttgacttttaatcattccacaatttataaatacattgaagccctgtggtaacccataaagatgtactattattatttgccaattaagaataaggaattttaaaatatcctggggtgggcaggcatgaagcaaagataaattatttcactaccttagaggagaatgtagctaagggctttttctgttccttctggctgtctttattgtgttctgccttcgtttaacacaaacttttaacattggtcttccatggccagggctagtcccacatatttctcatgtatataggtggtcttctctatagtagcagaaagtacaaaggcagagaactaaatttccatagctatggctctacttcatttgttctcttggactttattccccaaacctatttgttgcatatgtcacaacttatgtatctgctgaaattaatgctaacctatagctgaatcatgtaaaagctgttgcaagactgaatacttttattgttttatataaagaatggttactacttaaattcttgacaaatgtggttgcaaagttttttacttacctggtataattgagttttctcttttatgattcactagcaaagacagaacacatacctaaattctaaaagtcttagggttctgttttgtttttcagctctccttggaggcattttttattttctgaacatttttagccatggtgagctacctcctcattgtgaacagcgcttcctcccttgtgaaattggctgtgttaaatactccctccaggaaggtattatggcagatttccacagttttatccatccaggtaagtaaccagcatttgatagatcctaaggagcatataacttttaaacactggcttcatagtagtagttttcttaagagctggtgggttcttaaagagtgcatagacataagacttaagtcccaactattttggttgattggtgcttttcctcttaagtgaacattagagttcagaggatagaattcaaaaatgcacaacctgctgttcgtttacccatggcctcacatcttgggatttttctgctttgtctttccactatccgatccttcacctcagtagtctttagtatgaagctgatactgctttataaccttgaaaatacctttctgaaccagctagcttatttgtgaagtattagtgactattgagacagtgtggaggtagaccagtactctaaacatccttagtcatctcctttccactattcaattacactaaaggcaaaacaatagcccaggggagactcgaacctataacctcagcactctttcagaagctaagtaaggcaagattatttagcctacacagtgataccctgtctcaaggaacaaatgaaaagcaggatagttacaaagagtaggatctagacagttcccaaaggacggagagcagttaatacccttaaagtcaagaggggaaatgtatcaagagaggacagagctttaacattaatttggacatgttcattctcagaggacagcagagttaatcatcttatgcttgtggacattgctgcttagggcaagccatacagtttttagagtgtgtgtgtgtgtgtgtgtgtgtgtgctttgaaacactgataagataaaatttcaacgttctgaaaaatgtgtgtatacttgcagtattgtgtcccaccacccacagggctgtccattggaccctagctatagaagttgtttgccatgaattttctttccctagtataattttcctggaaggaacaacttgctgtgaaaaatacataaaaattatgttagttatcatatgtttgatttatacaacaaccaccaagacaaaagggaacaaaacaaaaaaaacagaaaagggcagtatgagttttaattttatatttcaaggtaataaaagtaacccacactgaaacttggtcatcatatgaaggattactgcagcacaagtaagagaacttcagatttctgtttctcaacaaagcactttgtgttataggtgaaattccacgaggatttcgattccattgccaggctgcaagtaagtataaaggaattggggtaagagggtctgagtggaacagccccgttaagacttgctcctttaacttagaaaaaaatgaaagctgtggggaatgataggtggaacgatctttaaaacctttaacctacacacgcacactcctggtataggggacaagactggggccttacacatgctaggcagtcactgccacagtgctggacttgcagcccaaaactcttaatgttttcctgactttaactcttcttctttccaaggtaatacaattttattttcctgatgttaataaattcgtaggtttccaaggtcagctgttggtatagtggccaggctcttaggaaagtcatgaaaagtttcaggtggtccagacttagacccatttatgagcaatgtctattttaaaaaacattttttttttttttttttagaatccatagttttaaaagttcagagtggagcagttttgaggtttgggtgaaagaatcaagcttttaagtattttgtaaccaaaaagtttgactatgactaaaatttatctaagattggagctcaactcttactagaaacaaggttttaagcagtttcctatttgactaaaatgaaaatcattagttttacattaaattgagattcattcaatatattctttaaggaaccatttaattcctgcttgtacagtttaactttaaaatgtggtcaactagtctatagaagtattagaaatagatgtttgtcaagcctactgtaactggaatatcctaacttttataatgcttgtgtatgagtgtgtgtgtgtacacgtgtgtatgtgtgtacgtacacatgagcatgcatgtgatcagaggacagctctgggcagtccgtttgttgcccaccttgtgaagctggatcatgagtttctcgggtgcctctgtctcccatcttgagatagacgtgctaagattacagatgcctactgccacatccaggttttgttgttttttaataatgtgggttttaggaactgaactcaggttgtcagagttacttacctgttgtactgtccctgaccctataatgctgtttttaattcaagtattttgtattatcccattatattttgtatttgtctgattctaatatttaaaaaacaagcaaacaaaaaaggtacagataagttgtttgccttaaaaccaaagttggaaactgtggattaaggagtttgagaatttactttttttttttttttttagttatgcctcctcatatattttaaaataggaaaagaagcttattcagaaacattttaaaatctccctcacaagttacattatttgaggttattgtgctagtaagtagatggtaattaaaaacaaatggaggagctagagagagaggtggctctgcagttaaagagtactttatacaagattcaggttcaggttccagcatccacatcaggatgctcacagccatctaattcaggggatctgatgcctcttcaggcctctataggtacctgcactcagtgttcatagacataaacacaaagaagtaagtaaaataagtctttaggacctaagaatgaagccagggacagtagcttatacttgtaattccagagcttggaagacttaggcaggaggaccttgtacaacttgaggcaagcatgggatataaacagagtttgttgccagcctatgccacagagcaagacttaaactcaacaaaaatgtcaaacatgtttttttgtgaaatctagtttctggttttattttcgtgtcttaacttgaaaacatggtttcagtgggttcatcatccgagtgggtgcatcgccttcctgctgtgtccactcagttatttagagtcactgttgccattcctttgctattttatgatcttatctttaaatattttgtttaattgcatgttttgcagtattttcacattaagcaaattaacagactccttcctttctaaaagctgcctctcttatctctgtctcttatctctatcttactggaggccagggacattttcttcttcctcatgctgaggatcaacctaagcaggtcctactgctgagccatagcacagctgggaatggcttcctaatttattatcccagataattgaaacagcacagtgttctcattcagacaaacttaaaatgtttggagcttgccaatttaagcctgtctcaagttaccaattaaataaccctgggaaatgtgccaattaaataagataaatgatggttagagtgacagctatgttgacatagtacctaaaaatgcctgtgctagtgtagtgtactgattcggagaagaccagacttcagagaataatctaccaagccagatccatgtattgacatgtgctctatttaagtagaggccaacaaacatgcacatagatttctcatggctatcgaaatggctcagtgggtaaagatgctgctaaagctgatggcctgagcttgatccacatgatccacatgtacctccttcctgaacaaatagagacatggctgcctggtcttcaggtagtgtcagtgaaatgaagactgcttcatgggcattgtaggttgccgtgttggagtagtaaagtgtctcaggactgaaaggcattttggtatgcattccagggacacctccttcccacttaggctcctcacaaagaggtgcttcaggttctctatgagctggggactgaggtcttgactcctccctcccttgagtgagaagaccttgccttggcttatctcactggtagtggcttttctttagagaagctgtgctttaaaagaagccaagctctgagtccatgctgcagtttctatatgaaaggcccatgagcttttcaaatgcatctgtatccagaaaatacaccaccagcttacattgtagactgttaatgaacagcacaagtgccattggcagccttccctcccccacaaaggtctttataagagaagtgttacaaattttgtgttaatcatattttctgaataattttgctatgtatatgttcattttttaatttttgtttttataaatatgtattagcatttctgtagttatttttaagcacatcttttgctcatttacttctttttcttacattctgtatgtttagtatagaactttactgtttgtttattaaaatgtatgaaaatgcccttttctcatcttgagccttgcatttttcactcagtgaggcctttttaaagaaagtttcagtactaggtgctgaaccctaggttttgcacatgctaagcaagtactacattgagctacatccctagccctgtgtggtgtcttttaataagcacaagtgttgggttttagttagcaagtcactcaatttttatcaactgtgactgtaaatagctctttactacctgaaggttagtcatctgctctaaactttgcagtttgttgtttgtatctggtgcttactccacctggaattgagaaacggcaatttaatttcattgctttctcctgtagacagccagttgtttgacatcatttagtgaacaacctaattttccccaatatgtagtgcttcttagactagctcatacttctgcttgtttttttttttttaaattggtctgatgggattttttgtttgtttgttttttgagggggctggcttgactatccttaattaagcataataatttgaaaatgtttagatagctctccccctgaccttgtgaaatatcatagctatttttgacccatgtttttatccacaatttggaaccagtctttcaccaaaaaaaaaagaaaaaaaccaaaacaaaaagcccttgttgataaattgggatcatctgtaagtatttgggtcattttggggaagatcgatgtctgcataatgtagcctttccatcgtgaacctggaattacttgtttcttcaggtctataatttccttaacaaggttattgctgatctttttttaaaagatggaagtctcaaccttgactagcctagaatttcttatttagaataggttatcatatctaggacaatcccctgcctctgagtgcctccatcaccttgccacttttatgttgtcttgtaagtgctatgttttgaattgtcttctggttttttttacttagttttgccttagtatgaaggctgtgatctctagtttgcagtgtcttaccaacaagtaattcgttgtagtttcttcttccctcactttccttatttttgctgtgcacacttttatcagagtgaagaattacttctgttttcagtttgattgcagatgagtattttaataagaatactcttttcaaggctccagtgtgaattcattagctacttaccaacttaaagactaccaactggtaacgtgttttgtgtcctgggtagtggtggctcacacctttaatcctgatgcagaggtagaggcagaagcagaaggatctctgatttcaaggccagcctggtttacagagtgagttccagagtaaccaaggctacgacagagaaccctgtctcaaaacaaaaacaaaaacaaaacaggcgacaaaacttgtttttgcactctagagaaaagccaacatggtaaccataggcctcttaattgttgtttggcttgctcatgctttgtcctagcgtctgtacgtttatgatgctgttgacgtcttacttggttgccaggtttactttctatgacgaaagatgatggaaatgggttgggatatgttttgttttgttttgttttttaagtttgttttctggttctgcagaaggtatttaataaaattgttatttctttgaacaggagttacctagttgtttaaagacttgtgttagtaattgtagtataattatgtttatttggagaggtcccaccagtgcccgacaaatagagaggtggatcctcaaagcctaccattggactgagcacagagccccaaatggaggagctagagaaaggactcaaggagcagaaggggtttgcagccccataggaggaacaacaatacgaactaaccagtacccccagagctcccagggactaaaccaccaatcaaagagtacacacggtgggacttatggctctggctgcatatgtagcagagtatggcctaattggtcatcaatgggaggagaggcccttggtcctgcgaaggctctatgccccagtgtaggggaatgccagggccaggaagcaggtgtgggtgggttggtgagcagggggagttgagggggcatagggggtcccccaaggggaaaccaggaaaggggacaaatttgaaatgtaaatatctaataaaaaaccaattacatgtattaatatgctttcatagcttcttagttattgtgttaatcagacaatcccccctccaccttcttccatgtgtgtatgtgtggtcatattactattatccaaagaatatttatggttgtgtctggcagaacactggagtcactaggcatctaagattacctgaatgcacgatcagaaattgagataatttaaaattatgcttcaaactttgcaagtaatccatctcagctctctaatgaagagatagaaggtggacaggttaccaccagaggattagacataaaatttgtaccatgcgcagtagaagtcaggagacaatacattttattaatattttcacatagaatctctaaaccagtctggcctcgaaagaggcactttttgagttctggccttgaacttctgatcttcgtgcttcacacagagccctccccccgcctcccagctctgagattacactaagcttaacattctatttacacaaatagaacaaaagcatcttaaatttttactgagtcggctaaaaattctataatttttcatgttttaaggattttcttcctcagttctttgtatttcttcctttccaagattccaggctccaattcctcattattgcattgttctctatagtacattgaagtagaatttcacttgttgaacctagtaacttctacatcaaagaaacttttgggtaccattctatgaatttcggttttgattctcctttctgtctctgtgtacctgctgtttcacaaagactgaaaagaaggactttcagagtaacttaggccttcagggagctacgttcactttagttatttacttatttatttatttttacttctggatgcacttagaggactcaggtttctaatcatgggttctaagaatgttgcttggccatttagctgcctctagaattaacaagtgatctaaaagcagccttttagaaacttcctaacttatcaccaagtcttaactgctgtacatgtatgcactgctaatagcttagaagtcctgtttttttgtggaagggttcatctgaattacatgatctatttttttctggaggcagggaattcacactgcctttaaaaatgatttactatttttaatgtggatgagtgttttctgatgtatgtttgtacattacatgcatgccattaagaccagaaagaggaggctgggtcctctgaactggagttgaaattgtcattagccactcactgtatggatgatgggattggaacctgggtcctctagaagagcagccagtgctactaacacttggccttctctccaaaccctctttaaaatagcagtcatgggccagcaatatagttcatgagataatggcacttgtggctaagcctgaatacttgagtttagtcatggactccacatggtgaggaatcagcttctgttaggttgtcctgtgaactccacatgcatactatggcatgtgcatatgctcataacaaattgtaaacaatttttatgggagaggctagaaaaattgctcaatggctaaagtgcttgtggcacaaatgtgaggggtgaagtttagagccatagaacttaacgaaatacctggtgcctgtgattccagcttcagacagacacagtgaatccccagagactaaccataccagcaagttctgggtttgagtgaaagaccctgcctcagtgagtaagggggaagagatcaagtatgattcctgatagcacactcaggtctccacatgcatgtgcatgtgtgtcctgttgtacccccccattcctacaaacatccatacacacaaatacacacatgaaaatgaaaaggttatactatgaagtcctccagaatttaacaaaacatttttgaaaggcatcataggaacaatacaaacattgtagacttggtcatcaagaaacatgggttcaagtaatgacttaattgttgattatttctgggagtctccatggtctcttcttaatttatgtatttcccaccttctagagtaatcataagatttttgttgaaagtgtgtacagtatctaatgagaagcaggcttggcacaaatgtttccatgtgcattacccactcttctgtaatcctgtgcccacacttagctggcttgtcttcctcagctcaggtgttgaccttccactctttatttctctcaggtgattctagtcacaagattcctatttcaaactttgaattcgggcatgaccaagcaactgtgttacaaaacctctataaatttatacatccaaacccagggaactggccacctatttactgcaaggtaatacccagtaagaagttcttttaagattattcttttagacaccagaagattttaaaaagatactgaaggaacttcagttttctgttagttgtatgtttttaaatgttctgaattaatttctgtgaaattagtatagcctttaaattcctaaattttggaggctacaaaagctgagtgtatttttttcaaatcccttttgaaatacctgcaatatctttttttgttcaacgaatggatactccattctgtatccacacaagactacatgctacacaagattactttccgttcaaagctatctttatatcaagtactttcactccatttgtgatatttagaaaagactttgctttatctaaagtctctaggatagtggtcacaaattgggtcctaaacttgctacacattgtatttccacgaccagatcacatggtctgaacattgagttcttgattgtcctactcttaagtctcatttgacttttcataaactgtattaacatatatgtgttactatctgaatgtatttatatagtcagttaataacagatttctaatgtatgctaattttaatagttttcagttagtatctacacacaccttaatttaaaaggactattaattaaaataatccaaaataggtgaaaataacaatgatttttccttctgcagtctgatgatagagccagagtcaactggtgtttgaagcgtatggagcgggcatcaggtgagtggaactggggtcattgcgggaagtgcaatgcatacttttaacatatgtgttatgaatgcccaaattcactaattttatttttctattcactaatggaagaaataaggcaagatctagaacttctcactgtagaggaccttgtagttgggatctaccagcaaaaattcctcaaggagccctctaagacctgggtgcgaagcctcctagatgtggccatgtgggactattctagcaacacgaggtattgatagttattttgtaatttgctaatgttgatatcttttctgaactacattctgagaaaataggctttgagctttgactaagttttaggttttgtgcttttgttttccttttgtgaagtactttttagttaaatctggtaaacatctaaaactatttttatgtgtattagtgtttgtctgtgcacacaccaaatgagttcctgataatcctgggggccagacaaaggtgttagatcctctgttgctggaatccaaaccctgggcctctagaggtgctctttactactgaaccagctctccagcctaggaaaatttatttttagatgtcgtattaatattagcatccaataattgatgaaaagatacagtgctgctttatacttaaaacaaaaaatactgccaaatgacctactagttttaaccagtaagaatttctctgctaatgaaacaatgcttttagatttattttgactttagttttactaagttgttttcatatatataataaataaagatacataaataaatttgcaaaaatgtttatttttattttgaaataatcctatatttactgaaaagttaaaagaacaataaaaataaacagtactctcttggtttctttaacatattaacacattttcataatgatttgtctctaagtacatgcatactttgtctaagccacttgagagtaaattaaagtcactctgcttctttgtatctaagtatgccaatattcctaagaatcaacatttctcttatagtagcatgattaccaaagtcagaatattgccattgacacaaagtactattatctaagcagaagttcataagttgccagtccttccataatgtctttatagataaaacagtatctaaagtccagtcctgggtcacatattgcatggtcttcatgtctcttacaagtactttgatctggaacattttggtcatgtgtgtgcctgagtgttactagggctgacctggaattcatgatcctactgcttcagattcccaagtgctggtattacaggcatgtaccactctcctgggctccttagtctcttatggttttgacatttctttgaagaaaaagtccaatttttttattggatattttctctgattatatttaaaatgttacccctttcctggatcccctccaaaacacaccctcccccttcccctgctccccaaccaacccactcctgcttcctggccctggctttcccccacactgaggcatagaaccttcacaggacaaagggcctctcctcacattgatgtcagactaggccattctctgctgcatatgcagctggagtcatgagtcccaccatatgtgctctttggtggtttagtccctgggagctcagggggtactggctagttcaaaccccttcagctccttgggtcctttctcaagctccttcattggggatcctatgctcagtcaatggatggctgtgatcatccacctctgtatttgtgaggcactggcagagcctctcaggaaagagctatgtcaggctcctgtcagctagcacttgttagcattcacaacagtgtccaggtttggggattgtaaatgggatggatccccaggtgagtcagtctctagatggtcatttcttcagtctctactccacactttgtctctgtaactccttccatgggtgttttgtatcccccttctgagatggatagaagtatccacactatggtcttccttcttcttgagtttcatgtggtttgtgaattgtatcttgggtattctgagcttctgggctaatatccgcatatcagtgagtgcatatgatgtatgctcttttgtgattgggttacctaactcagtttgatgccctccagatccatccatttgcctacaaatttcataaattcattgtttttaatagctgggtagtactccattgtgtaaatggaccacattttctgtacccattcctctgttgaggaacatctgggttctttccagcttctggctattatatataaggctgctatgaacatagtggagcatgtgtccttattacatgttggagaatcttatgagtatatgcccaggagtggtatttctgggtcctcatgtagtagtatgtgcaattttgtgaggaactgcgtgtgaaactgatatccagaatggttgtaccagcttgcaatcccatcagcaatggaggaacgtcactctttctccaaatccttgccagcatctgctgtcacctgcattttttatcttagccattcttactggtgtgaggtgcaatctcagggttgttttgatttgcatttctctgatgcctaaggatgttgaacattttttttaggtgctcctcagccattcagtattcttcagttgagaattatttgtttagctttgtaccccatttttttattaggtatttatttcatttacattcccagtgctatcccaaaagtcccccacacggccccacccacccactcctatttcttggccctggcgttcctctgtactgaggcatataaagtttgcacaaccaatgggcctctctttccactgatggccgactaggccatcttctgatacatatgcagctagagacacgagctccagggggtactggttagttcatattgttgttccacctatagagttgcagatccccctagctccttgggtactttctctagctcctccattgggggccctgtgatccatccaatagctgactgtgagcctccacttctgtgtttgctaggccccagcatactcgaaacacatgaaactcaagaagaacaaagaccaaagtgtggacactttgccccttcttagaattgggaacaaaacacccatggaaggagttacagagacaaagtttggagctgagacgaaaggatgggccatctagagactgccatatccaggggtccattccataatcagcttccaaacgctgacaccattgcatacactagcaagattttgctgaaaggacccagatatagctgtaccccatttttaatagggtaatttgtttctctggattctatcttcttgagttctttgtataggatattagccctctatcagatgtaagattggtgaagatcttttcccaatctgttggtggcctttttgtcttcttgacagtgtcctttgccttacagaagctttgcaattttatgaggtcccatttgtccattcttgatcttacatcacaagccattggtgttctgtacaggaatttttcccctgtgcccatatgtctgaggctcttccccattttctcttctataagtttcagtgtatctggttttatgtgaaggtccttgatccacttggacttgagctttgtacaaggagataagaatgggttgatttgcctccttctacatgctaactgcagttgagccagcacgatttgttgaaaatgctctcttttttccactggatggttttagctcctttgtcaaagatcaagtgaccataggtgtgtgagttcatttctgggtcttcaattctattccattgacctaccttcctgtcactgtactaataccatacagtttttattacaattgctctgtagtacagcttgaggtcagggatggtgattccccaagaggttcttttatttttgagaatagttttcactatcctgggttttttgttattccagatgaatttggaaattgctctttctaaatctatgaagaattgagttgaaattttgatggggattacattgaataggtagatagcttttagcaagatgataatttttactatattaatcttgccagtccatgagcatgggagatctttccatcttctgaaatcttcgatttctttcttcagaaacttgaagttcttatcatacagatctttcacttccttagattcacaccaagttattttgtattatttgtgactattgtgaagggtgttgtttccctaatttctttctcagcctgtttatcctttgagtagaggaaggctactgatttgtttgaattaattttatatccagctacttcactgaagctgtttatcaggtttaggagttatctggtagaatttttggggtcacttaagtatactatcatatcatttgcaaaaggtgatattttgacttcttcctttccaatttgtaccgctttgatctccttttgttgtctaattgctctggctaggacttcaaccactatattgaataggtagggagagaatgagcagccctgcctagtccctgattttagtaggattgcttcaagtttctctccatttactactggtttgctgtatattgcttttactatgcttaggtatgagccttgaattcctgatctttccaagacttttatcatgaacgggtgttggattttgtcaaatgctttctcagcatctaatgagatgatcatgtgttttttgtctttaagtttgtttgtatagtggattacattgatggatttccgtatattaaaccatccctgcatccctgggatgaagcctacttgatcataatggatgatcgttttgatgtgttcttggatttggtttgcatgaattttattgagtattttttcatcaatattcataagggaaattggtctgaagctttttttctttgttgggtctttgtgtggtttaggtatcagagtaattgtggcttcatagaacaaattgggtaaagtaccttctgtttcgattttgtggaatagtttgaggtgtattggtattaggtctgctttgaaggtttgatagaactctggactaaacccatttggtcctgggcttttttttggttgggagactattaatgacagtttctatttctttagggaatataggactgtttagatcattaatctgatcctgatttaactttggtacctggtatctatctagaaaattgtccatttcatccaggttatccagttgttttgagtataggctcttgtagtagaatctgatgatttttttggatttcctcaatttctgttgttatgtctcccttttcatttctgattttgttaattaggatgctgtctctatgtcctctagttagtctggctaagggtttatctattttgttgattttctcaaagaaccagctcctggtgtggttgattctttttatggttctttttgtttccacttggtagatttcagcactgattttgattatttccttctgtttactcctcttgggtgaatttgttctagagctttcttctagagctcttcttgttgttctagagctttcaggtatgctgtcaagctgctagtgtatgctctctccagattctttttggaagcactcagagctatgagttttcctctcaggactgctttcattgtgtcccataagtttgggtatgttgtggcttcatttttattaaaactctagaaagtttttaatttctttatttcttccttgaccaagttatcattgagtagagtattgttcagcttccacgtgtatgttggctttctattatttatgttgttattgaagatcagccttagtctgtggtgatttgatagggtgcatggaattatttcagtcttcttgtatctgttgaggcctgttttgtgacctattatatggtcagttttggagaaggtatgatgagattctaagagggtatagccttttgttttaagataaaatgctctatagatacctgttaaatccatttgtttcataacttctgttagtttcaccgtatctctgttcagtttctgtttccatgatctgtcattgacgagagtgggatgttgaactctcccactattattgtgtgtggtgctatgtgtgttttgagcattagtaaagtttctttaatgaatgtggatgcacttgcatttggagcataaatgttcagaattgagagttcatcttggtaaattttacctttgatgagtatgaagtgcccctccttatctttgggttggaagtcaattttattctgtattagaatggctactcatgcttgtttcttgggaccatttgcttggaaaattgttttccagccttttactctgaggtagagtctgtctttgtcactgaggtgggtttcctgtatgcagcaaaatgttgggtcctgtttatgtagccagtctgttagtctatgtctttttattggggaattgagaccattgatatgaagagatattaaggaaaagtaattgttgcttcctgttatttttgttgttagagctgggattctgttcttgtggctgtcttcttttaggtttgttgaaggattactttcttgctttttctagggtgtggtttccctccttgtgttggagttttccctttattatcctttgaaaggctggattcatggaaagatattgtgtgcatttgattttgtcatggaatactttggtttctccatctatggtaattgagagttttgctgggtatagtagactgggctggcatttttgttctcttagggtctgtatgacatctgcccaggatcttctggctttcatagtctctggggagaagtcaggtgtaattctgataggtctgcctttatatgttacttgacccttttcccttactgcttttaatattctttctttgttttgtgtatttggtgttttgattattatgtgacaggagaaatttcttttctggtccaaactatttgaagttctgtaggcttcttatatgttcatgggcatctcttttgagaagttttcttctataattttgttgaagatatttcctggccctttaagttggaaatcttccttctcatctatacctattatccttaggtttggtcttctcattgtgtcctggatttcctggatgttttgagttaggatctttttgcattttgcattttctttgattgttgtgtccatgtttcctatggaatcttctgcacctgagagtctctcgtccatgtcttgtattctgttggtgatgcttacatctatggctcctgacttctttcctaggttttctatctccagagttgtctccctttgggccttctttattatttctacttccatttttagatcctggatggttttgttcaattctttcacctgtttggttgtgttttcctgtaattctttaagagatttttgtgtttcatctttaagggcttctacctgtttacatttgttctcctgtatttctttaagggagttgtttatgtcctttttatcatcatcctgagaagttactttagatccatatcttgcttttccagtgtgatggtgtatccaggacttgctaaggtgggaaagttgggttctgatgatgccaagtaaccttggtttctgttgcttctgttcttatacttgcctcccgtcatctgattatctcaagtgctccctgcccttgatatatctgattggagcctgtccttcctgaagtcgctgttgagtcagaactcctcagagtccagtttctctgggatcctgtgatcctgagatcttgggtgtgtcagaattcttggcagtcaagcttcctctgagaccctgagatcctggtgtgaccaagctcctgggatcctaagatcctgggcgtgttagagtgcccctgtggtacttcctctgggacctcggggctgtctgctgagttcgataccaaggtagaccagtgctgaaggaaggaacccaaaccactgatcgggtggggctcctgtgtccctgcccctactgtctccagacactcccagttctgttggaagaaatgttgtgttccactcaccaatgatcctaagatcctgggtgtgctagggtgcctggagagtggacagtcctctggggactgtgggactatctgttgagtttgagcccaaggtggcctaacactcgaaatccatttattttataaaatgtttctcagtttgatttggcttatgtttcctcatgactaagttaaggttacacattttaggaggaataccaccaaaaaaaaaaaaaatgctatatctcctccacatgtctcacacttgtccatatgtcagtttgtcccattcctgattgacagcttagttgccttagatctgttgaagtcccctttggtcagtcactttcatgtaccaacctcataattggttgacatgagctcagcagtagaatgctacctagataatataaggcccgaggttcagtctccaaaccaaagtaatttaaagtatttttgcagataatgaaattccttaaattgtcaaatactagttctggcatcagtgataatttaattgaaagggttcctcccatgcttgtgaagtagtggtctttccttgccccttcaggatttcttagttagaattctataataaaggcttttctgctgggcatggtggcacccgcctttgatcccagcactcgggaggcagaggcaggcggatttcttagtttgaggccagcctggtctacatcgtgagttccaggacagccagggctatacagagaaaccctgtctcaggaaaccaaaacaaacaaacaaacaaaggcttttcttcaatttttacttcatgtgagtataggcttgtgtggttttattcagtgagttgtactctgtatcagggcttgttcattaagctctactagcatatgggacctgaaggggctccttcaggcagcggtctctatgtcctttcacagcatctgctcagttgcttgagtgctgtttcctttctagtacattccagcttcgtctttcattgcttcagtcatcccttggattagtggtttatctgctagaccctgttcctttcagtggcagaaggtgctgagaatgagaatgtgttcagtatctgtcttactgtgtgagtcttgagatgcattaacagaagttttcagtgttggtggaaccatggcaattcagaactcatttctggttgactttagtctgaggatagagtcacaggaattttctcaaagttacttgggttatttctttcaccccttcacaatactgcttgtttatatcccatgttgttcccacctccattttgttggcttaattagcctttgaatgtataaagtactagcatttttctaaccatgcatattcaaaagtgtcactcacttaactgaaaccctacaaaggtttagaaattaacttggttggggagaactgactctttaaataaaatgtagagttgtgtcatgtttgtcacacaggtttgtaggtctaatattggtacactgatgagggtggcagttcctctgtcaactttacttcttccatggaaactgatttatttaagcgtcataattctaacagtatttgtatattttgggggaactatatagagtgaaaaagattttttaagtgttttgagatgtctgcaagaaaggaaacctcaaaatttttatttccaaactttcagtgcttttgtgacatcctacagattatgaaatgtcattttgaataggtactgtttaattcattctctaataaattcaataaagtaaatgtataccttttaaatgagtagattaaaggcctttctggattttgtttcttttcataaattacagatctttgcattaagaccaaactctgttgattgttatataaaaaaactatggtaattatttatggttatggttttttttttataacagtatataatcaattttacaaactgtcctgtaaacacatgagactattctctttggggttgtaggatttgaatctatccacaagatctacactgattggttggctagtcagttttctgttactgtaattaatacccaagataatcagcccacacaaagaaagggatggtttagctcaagtccatgatcagttggcctctttcttttgtgactgttcatgcagtgtcttgcagtgggagtgtgtgtggtaaagcaagctgcgctactcaacactgggaagttaaagaggaggggactggtgttaagcagttgtttaagcagacacacactagcctcaactacctgaaggcctcccactcaccttcctcctttttaacataaggtctcactatgtaaatcatactgtcctgtacttgttttgttgaacaggctgaccttaaacttgagatccgcctgcctctgcctccaagtgctggaatcataggtgtgcaccaccacaccctataccttgcttcctagataaatctaccacctctcaggaaccactaagctgaggacctttcaggaactgagccacaatgactgtgcttgcttgcttgttcaccatggttattctgcctcactgtcctctgagtgctgagaatagacacatgtggtaccttgtctgcagatttccttactcttagttaactctttatcttcttgatagactatctaatgggactagtgtttttactatgtgcccattaggctgtttgcttttaaaggagtctgtacattaaaaagtttggtgaatctttgtgtatgttgaagggaaagttaaaaggtatttcctagtttgggtttttttgttttttatttttgttttttttttgtttttttggcatggttatgatttccacagtcacactttgtgtccatgaattcctaagaaaatataactccattgtgttgtatattccttttgcaaagcttatcattttcttagctttagctatgtgggttttttagcttagagactttaaagactcttggcttgttatttaaggtccattttatgaggtgtccaataaaccatttcagtatgccaaaattggcatctgtttctagagctttttctcaagtagaaatttttcttccactcttaatttctgttaaggaatccaatatatactatagtaccttccactttagttactttctctttttactctttaatcgtttattctcatggcagttttctggtttctagtttctctttcaagatgaatctctgtttctttgggaagtttgtaatctacttaggactttttttttcctgttttgatttctgagtttagtcaactctatttctcattttaaaaattgtttatagttctgaatttttcttattcagagtgtttccatgtcctcacatgcttgtgtgagaacatttaattccatgtagaatgttatgttagagttttcatctttttttggaagttacaagtattttcttatttatgttctgatatctttctgtggatgaggcctgctattacttttgtctcttgggtagatgttttgacagaatgcaagttcagttcaagagctccctcttctgtcagtgtagcaaccaacatacaggttcactaacaaatgactgatggaaggtagctggttttccatttttatttggtcgtacaggatcttacattgattccttgggctcctcatcaccatcgatgattcagtgactaagggccctcctacaccgatgctttcgtaacatacaagggctttgctcttccaagtctctaggtcagtttttatctagaagggtcttcctctttgtggggatgattcaaatttagtctcaggtactcctctttcctttttctctcttccctacagccttttctgaactccacaattgagataaagacttgaaatgagacagataaatttctccattgcaaaatattataaagttttctctttataatagggtttttagtgttccgtcctctatactgttagtatagaatcttatttactgtcttttgtcattgttgttcttgttgatctgtaaaatgttgtacatgatgttaggataggctcaatacagttactttagttactggccaaagtatttctaaaactacatccagaagtatttagtgtctgtttattttcagtattaccctctgtgccacttaaaatattggtaaaatagcactttgttttaataagattcccaatgatatctgggatttttttccaaacagctgacctttggtgcatatttctgttctggcctttttagcattaccagaagagatcaataaaaagttttcagagacaaactattttctaaaactcttaaatactggccaaaatacaactttttttttcaaaaaattaaatatataagcttagaccatggtaattatttcatataccttaatagcaactgtatactatctctctgtgtaagaaaaattccagcatcaattatactctttgggttttgtttgtttgtttgtttgtttatagcatttttaagatattttcttcatttacatttcaaatgctatcctgaaagccccatatacctccccctggcctgctccccaacccacccactcccacttcctggccctggcattcccctgtactggggcatataatctttgcaagactaagggcctctaatcccattgatggccaactaggccatcctgtgctacatatgcaactagagacacagctctagggggtactggttagttcatattgttgttcctcctatagggttgcagaccccttcagctccttgggtactttctctagctccttcattgggggccctgtgttctatccaacagatgattgtgagcatccacttctgtattttccaggcactggcatagcctcacaagagatagctatatcagggtcctgtcagcaaaatcttgctggcatatgcaatagtgtatgggtgtagtggtggtttttgggatggatccccaggtggggcagtctcgggtccttccttcatctcagcttcaaactttgtctctgtaactctcccatgggtattttgttccccattctaagaaggaacaaagtaatcacattttggtcttccttcttcttgagtttgatgtgttttgcaaattgtatctgttaaatccatttgtttcataacttctgctagtttcactgtgtctgtgttcagtttgtttccatgatctgtcattgatgagagtgggatgttgaactctcccactattattgtgtgtggtgctatgtgtgttttgagcattagtaaagtttctttaatgaatgtggatgaacttgcatttggagcataaatgttcagaattgagagttcatcttggtaaattttacctttgatgagtatgaagtgcccctccttatctttgggttggaagtcaattttattctgtattagaatggctactcatgcttgtttcttgggaccatttgcttggaaaattgttttccagccttttactctgaggtagagtctgtctttgtcactgaggtgggtttcctgtatgcagcaaaatgttgggtcctgtttatgtagccagtctgttagtctatgtctttttattggggaattgagaccattgatatgaagagatattaaggaaaagtaattgttgcttcctgttatttttgttgttagagctgggattctgttcttgtggctgtcttcttttaggtttgttgaaggattactttcttgctttttctagggtgtggtttccctcgtgttggagttttccctttattatcctttgaaaggctggattcatggaaagatattgtgtgcatttggttttgtcatggaatactttggtttctccatctatggtaattgagagttttgctgggtatagtagactgggctggcattttttgttctcttagggtctgtatgacatctgcccaggatcttctggctttcatagtctctggggagaagtcaggtgtaattctgattggtctgcctttatatgttacttgacccttttcccttactgcttttaatattctttctttgttttgtgtatttggtgttttgattattatgtgacaggagaaatttcttttctggtccaaactatttggagttctgtaggtttcttatgttttcatgggcatctctttctttagattggggaagttttcttctataattttgttgaagatatttcctggccctttaagttggaaatcttccttctcatctatacctattatccttaggtttggtctttcattgtgtcctggatttcctggatgttttgagttaggatctttttgcattttgcattttctttgattgttgtgtccatgtttcctatggaatcttctgcacctgagagtctctcgtccatgtcttgtattctgttggtgatgcttacatctatggctcctgacttctttcctaggttttctatctccagagttgtctccctttgggccttctttattatttctacttccatttttagatcctggatggttttgttcaattccatcacccgtttagcagtgttttcctgtaattctttaaggaatttttgtgcttcctctttaagtacttctacctgtttagcagtgttctcctttatttctttaagtgtgttattaatgtccttaaaatcctctaccagtatcatatgattttaaatccaaaccttgcttttcgggtgtgttgtggtatccaggacttgctgtggtgggaatactgggttccaatgataccaagtggtcttggtttctgttagtaagattcttacacttgccattagccatttggtaatctctggtgttagatgttctaactgtctctggctggagcttgttcctcctgtgattctgttagcctctgtcagcactcctgggagtccaactctctcctgagttccaggggtcagagcactctctgcagacaagctctcctctggcagggaaggtgcacagaggtctggaactcagctccacctcctggctgaagatgaaggcctgaagggatcctgtccaagaagttctgttgtttctaaagcagcccatgcactctcctgtacagactggtctctgagagacccgagatacaagaagttatagtctttataatagaagaaatacagtgataagttcaattagtaaatacaggttgaacaatatttaaagtagctttactgtaagacatttttggaggaggcctgtgttatagggttggttcagagaaactaatgacattttatcgcagccagcttagtgaggaagctgtaaccatgtgcctatacctgtcactgagcacatcaaaagtaataaaattttgatggagtttagagctaataaactatagaagctagttataaactgctaatgtaggtcaagaggactaattttaaacactgctctaaagttcctactaaaagagttagtagctagtggctgataacatattatcttaaagtctaggaaaaatgggtacattttaaattaatgtagtttagtaattaataaggtagtaaggggcatactattttagaggctcaaatgtttaaattttaataactgtcttgttctaatgtttcttgtcaaattgtcttttggttaatatacaaagtctgtggcctgcagcacagccattatttaatcagcaaatactgactcagacatagtgacacaaacttctaaccccagtaagcagagtcagaggcaggaggattgttacaagtgcaaagctatcctaatctatatagggagttcaggccagccagaaccccatcaaaacaaaacaaaatttactgcatatctttcttgcacatagcaaaattcatgtacctctaccttcctgaagctaacataggaaagatacatgcaataggtaattttaagaaaattaacattttagttgtaataaatgctaaagcaatcaactgataagtgtggaaagggagactataaaatgaacggtcaagaggactatttaattgtaatatgaaagtaagagatgaagcagaaggaagaataaacgaagagaaccttgttagaaacagtaattttaccaagtatgaaagaaaactgattagctgcctaaggcttttacagatgcattgaaaggagataaaaggaaggcgtgaagcctatgattattggatgagctggcattagatgacttgggactaggatggtgacagtagagacaggagtaagtggttttagattagtaacaagcagtagaccttgcttacaatctagggagagaaaatggaagctgagtgacaaagcatgaagagccgagtttagaatattgtgggagccctggtgaagcatctgatgagccacagtgtggatgagatcacttacagactgagaagaagactcagtgccgaacctttattaatagctctgccattactataacaaagcttgggcagcgctgtgggtttggatatgtcagcacctcagcctacagttgctacgttacacaaatgagtcatgtcagtgtccgtgatggagactggtaaggtgaagagtgaaaccgtgttacatgcagtaactaacttcacagtccaccatgagctgtttcttcacttttgttccttggtttatttcattgtttgggaatataagttctatggcatttttggtgctgcagactttctttgaatgtctggttctccttaattatgtttatatttagaaatgaggcttcaaaaccaagtaaatggcccactttgtttagtgagaactaccaactagtcaggctttgcagaagcagaaaccaacaaaagggtttggtaagttggaagcagaatcctaaatttaagagcagtccgcttattcccttgcatggtgttagagaatgacagatctttgaacagaaattcagtctcctaacctccaggcatccctttcttagtttatttgtctgtgtacatgtatgctgtggaaagttctgataggcagatcttcaggtagctctttccctgcctactctgtgggtcacaaaggcagtgacttgagataccattcctcatttattcctatactgttattaagctgttatatagaagcttgttgtttttctttgctgtgtgcatctagttgactgtgattttcaaatgactttggggacaagaaataaatgtatgcatgtatttaattctccagcttaaagccttggcaatagtagttttaagaaacgaggttttatagtgtgacatcactttagaatttcatccttagttcaattaaataagctttctttatttaataaaaatttgagcagatcttgtataataagacactaggttctgtgagtaatgtggtcaagcgtgacataatcttaatctcagtctccttcccaataacagcagtgagatgagtggccatacgagactcttacctagagggactgctaagaaaccttaaaaagctgtcaaagaatgatgtttgatcagactagagacaaagttgatttcaaattacgtcactgtaagggttttaaaaccgtgaaatacttcatggggtattttgtctgatttattttttttaaacagaatttctgtgggcagtgatataggctaaatagaggacgtttccattagaaagcaggctcagcagtgattctggaataaggatgtacacggactgtaaggccagtgagtgagcctcactagaccatagagaactgtaggatgatgcgaattctgatagttttccttggaaggaagagtatattctgacataggggcagaagcagtcatcaggactttatggaataagaaggggtgtaaataactttatgctgtgtatatgtggtgaggcagcatcaggagcttaaaaaatacacagtaggtaaattgaaaccagtgtacaaggggctagagatggcgtatagtgctcttccagaggatcagagttcagttcccagaacccatgttgggcgcctcacactacctgtaactgtaatcccagagagtctaccctctgtgctccataggcacctacactcccttacatgggtacacacataattaacatttttttaatagcacaaactagatctggtttctgatggcaatagtactgggtactttttcttttaactccaagagactcaagtttttagaagttttgttatggtttagtggaaaaagattaataagtgagtagaaatagattaaacagcaccactttaagtagtgtcttagtcaggcttctattcctgcacaaacatcatgaccaagaagcaagttggggaggaaagggtttatccagcttacttttccatactactgaatatactactgaagtcaggactggaactcaagcaggacaggaagcaggaactgatgcagaggccatggagggatgttacttactggcttgcttgagttctagtcctgagttcctttggtgatgaacagtggtttgaaggtataagctaaataaaccctttccttcccaacttgcttcttggtcatgatgcaggaatagaaaccctgactaagacagtagggtagccatagatttagaaacatttttgtttgggggtttgaggttttaagtttttgtatattatttaatacttgaatatattatttaacgttgacttgttattttttcactatgtgtctgtgtgtgggtttgtgcacatgggtgcttgtacagagggcttcagaaccctctggagatggaattttaggtggttgtaagctgtctgacatgagtgccagaagctgagcttgttctctggaagagcattttactcctaactgtaggcttctccctccccttgggtgtatctcagatctgacctgtatagaacgcatgtatctgggtaggtccttgtgacttgaaatctagacaaggagcaaaactaataacactaacacttactaattctatatggttatctacaatattggttcttacatctttaatttagagctttatgactcacatttatcgtatcactagtctttggaaatacaggggggtggggtgttagattgattttagatcatctacagttaactgtcacttggcacaaataactttatagttaatgaatagcactttttatggttttcaatgaagattcttgttaagtttaggcaagctttgtattgttagtaatactgttctgagtcttagtagatggtacttggtaggaaaacacaagtttattgtttctgtgtttgtagttctggattaaatcatttgtctgactttggtcatttcctctctaatgttttctcttgtctccattcaaccatcactttttcaaggtcactcccttccatactgttgctactgcttcacatcaatccatagttctttagaacttttctttaaggatgcctatatgtcttttgatactcctttaccaccaaaagaaagtgctctgagatgacttcattcagttctgtgtccttcatgcctagataattggcaacatgtgtgcagtccatgtttagtgactgtgttaactttagttactactatgcctctataaccctcattttaaggtaaaatttaattgtatgattatgtctagttttcacattaagaattttcactggaagaggttacatacaactctactttaatatctgtattaaattaatctttgaggagcactgagatagctgagtgggtaaaggtgcttgcccatcagtttgatcctggaaacccatgtggcagaggaagagaaccaactctacaagttgccctctgacctccacatacgcatactcaatattaaataagcacaatagtaagcacaaacaataaataaatgtaaaagatgtaagaaattttgagtaatagtatcagtttttattagcatatctcagctagttgaattggaaatctagcatataaaaaaaccttaaacaggtaatgtggcttagctacttaggttagtgcagattttctctgtgtactggggatagaactccagatttattacacactctatcctcgaccacttattagtacattaaatcctttttcttgtacaggtgcaaatggcatgaagaaaatgatattctcttctgtgctttagctgtttgcaagaaaatcgcgtaagtataggaaggagttctgtgtgtgctctgcagggagtcctctctgcctggtgtgcttgctcttgtctgtccaccagggtgtctgttcacttccttactctaaaatccaagaaaaccaaaggtggtttttgagggttttttggatgttttggtttttttaatgttacttttactgttctgtccacatcattgctaactgaacaatttgggcaactcttgagaagtatttattgaggtgtttctttcttgggccccttaaggagaggcagttccctgctagcattaagaatatcactttcttgtgatggggtcctaaaattgtaagccattgttcttgttacagagtgaaagcacctacgggaagaagaatttgtttggacacttgtaggtcacagtccatcattgagtgggtgtcagggcaggaactcaagcaggaaacaggagccatggaggagcctagttaaacttaatggctcagtttaactaggtttcttacacagcctagggctggtgttgccaacagtatgtagcagccctatcaggttgctgacaactgcagtcacgaggacaggcccaagtctcagggtctctgtcagcgctgtcctgcagatgcttttcagctctaaggactgtgatggtttgacttctgcttctgccttcaaaccctggagaactgtcctgatccttccttcattcccataccctgtagcaaacctgagatgttatctagtcattaggagattgcttaccagtgatagcattcatggtttgaatgctgcctgttctatctcctctctcaatccctaggcttttcttcaaattagaattccactcctgagatgctttctttgttggaaaatttaacctgaatgctttagagtgaaccaaatcaagttgctctagtgagatctgtcttcatttttaaaggtactgcatcagtaattctctagccactctgtttggaatccagctcactggagctcatgtaccactacaagactatgaggccagcaacagtgtgacacccaaaatggttgtattggatgcagggcggtaccaggtaaggaaaccttgttgtcacaaaaccttggatgtatcttaaattctttgatgaaaatctggtttgttttcttctagtttgattctaagcaatttctctcttgtcattttcaagtgaagatatatttttctatcttgtagtcaagatagtatcttcaggtttttttcttaattccttagaccttcttcctaaaattcccaagttttgaaatccatgccatccaggctacagtacctggcaagtcaactgggcaatcagtaggcactttagttgggactcctcataggagtgacattgaaccaagggagcaagtagttttccaattaaaaaaaattattttttactgtcaactaagtaattcagctccctgttgtttcagttccttattctcctcccgtctcacaccacgtaagtctgcactcctacggtcatagcctgtaccaggggctattgttcacagtctcagcatcagttggcctcttttctgacttcacaatcctcctcgagcaacccaatacgagcagttctgtgacctctgctgtgacctgcagttcccttacttacagctcctctatcttatgctcccttaaagagctactgcactgcacaaccccagtgcactatttgcatgtctaaagttgtggcctcttgttcttattttctttttaccacctcacttttagtctgtttttctgctgctttatctaaactccattaatcctcttgtcttcatcatacttggttgacagactaatcctgattaaatgtaactcctcacctactccttatatttgtgaattgaaataaatctagaatgaactactatgctgccaagtatgatagtaaatacctataatcccagccactctggaagcgaggggaaagatgacaagttcagggccaggctgggatgcatagcaagtgtaagagcagcctaggcagctaagcgagactatttggtctcagacttaaataagggataggatgtacttgcatgatatgtgcaagtctttgggcttcgtcactacctacacacacacacacacacacacacacacacacacacacacaaagaggagggtgaaaggaagggaagggaaacttccataccaccgcaatgactaatcttcctaaatttcttttatggtcagtttcatcaactcattgacattgcctggctgttatcatttttgtagtctaatttctcttccaacttatatccccttccccataccctcgctatagctaatacttatgcttctacttctccaggaaagcagaagcagtcacagcaagattttctacattcctaccacgtcacccacctgcctctactttattctctgcttgtactgatgttaatgaacaaatgctctatatttctatttaaaatttgtatattggatcttgttcttagactgaccaaagacatggctgctgggatttttgaatcttcagggctctctctattctgaatcattcttctttatatttctgtctctgtcttttttttttctctctatctctctgtctctctgtgagtgtatgtgcgtgtgtgtgtgtgtgtgtgtgtgtgtgtgtgtgtgtgtgtgtgtgtggtgtgtgtgtgtgtgtgtggtttgtgtggtatgtgtggtatgtgtggtatgtgtgtgtggtgtggggggggatgtgtgtgtgtgtgtatggtgtgtgtggggggttgtgtgtgtgtgtatgtgtgtgtgtgatatgtatggtgtgggtgtgtgtgtgtgtgtggtatgtatggtgtgtgtggggggggttgtgtatgtgtggtgtggtgtgtgtgtgtgtgtgtggtatatatggtgtgtggggaggggatgtgtgtgtgtgtggtatgtatggtgtgtgtgggggggttgtgtgtgtgtggtatgtgggggggttgtgtgtgtgtggtgtggtgtgtgtgtgtgagtgtgtgtatggtatgtatggtgtgtgtgtggtgagggggttgtgtgtggtgtagtgtgagtgtgtgtggtgtggtgtgtgtgtgtgtgtggtgtgtgtgtatgtatgtatgggggagggggagtctgtgtctgtgtagacatgtaaaggtcagagaacttgtgggagttggtttactcttcctactgtgtagactccaggatcaaactcaggtatcaagcttggcataagcacctttgcctattttgctagccctgtttactcttatcaaaacaaaagtatgctgtaatctaatttttaaaaaaataatcaaaattcttaaacctgtgactctgaagtctgcagagtccatcctgtctcctcccttacagaaagcatggataaagattgtggaaatagttatgtttgcacttttagtaatctggaattaaagtaggccatctaatagttgatgagagtaaacactttatctggtattttcctgttcctttacagaagctaagagttgagagtccaggattctgtcatttcaactcttacaatcaggaacaaagatcaaatacatctactggtgagtacctttagtttgtaagaatgggttatgccttaaactttacagagatcccagggtgtttctgggtggtcatgaggatataaggagctttttgaattgagtattttgtttgaaatgacagttaaaacactttgaatgtgtgtaatttttttgtcccgaatggaatatagcattcctcagatttttgagccagacatttctaagaaaccctatttttcttgtagtgactacagtttgataggttcgatgtgatatatgatgtcttttgggaagatgagaaatttaaaaagccagttaatgagatgcccagtggtaccaaagaactacacttggggttcttgcctcagacaaatggaagcatcttctttacccacttagttgccttttgctcatgatcttttcatcatggcttagtgagagtcctgcactggtgtgtaccccacttcacacatacacacccacagttaactgaagtgcctcgttatgatgcgcatataaaatcacatgtctggtttgttatcttttcactaccttaggttattatccatctggggtgaaaatttcgggccctcacagcagtgttcgcggaagaggaattacccgcttactagagagcatctcaaactcctccaacaacatccatagattctccagctgtgagacttcactctcaccttacacgccccaaaaagatgggtacaaacctttctcctccttttcttaatgatggtactttgtgcgatttctggaaaaataacaagccaacttcctttctgactacagtcatattaacaaacatcacatcaatagtaaatgtcactcctaaaacctacttaatttgtaaggaaactatttcatagattaaaagtaattgtggttggagaagatcttggcactctt

SEQ ID NO: 302 - DNA, 1563 bp, Mus Musculus
gctcggttactaagggcgggagcccggcaagggcgccggctgcttgctgcgtctctggagggcgtcgaggcccgacgacgccatgcccaaccgcagggccagccgcaatgcctactatttcttcgtacaggagaagattcccgaactgcgccggcgaggcctgccggtggcccgcgtggcagacgccatcccctactgctcggccgactgggcgctcttgagggaggatgagaaggagaaatactcagaaatggctcgagagtggagagcagcccagggaaaggattctgggccttcagagaagcagaaacttgtatctacaccactgaggaggccaggcatgcttgtaccaaaaccaagtatttctccccctgatatgtcaaatttatctataaaaagtgatcaagctctccttggaggcattttttattttctgaacatttttagccatggtgagctacctcctcattgtgaacagcgcttcctcccttgtgaaattggctgtgttaaatactccctccaggaaggtattatggcagatttccacagttttatccatccaggtgaaattccacgaggatttcgattccattgccaggctgcaagtgattctagtcacaagattcctatttcaaactttgaattcgggcatgaccaagcaactgtgttacaaaacctctataaatttatacatccaaacccagggaactggccacctatttactgcaagtctgatgatagagccagagtcaactggtgtttgaagcgtatggagcgggcatcagaaataaggcaagatctagaacttctcactgtagaggaccttgtagttgggatctaccagcaaaaattcctcaaggagccctctaagacctgggtgcgaagcctcctagatgtggccatgtgggactattctagcaacacgaggtgcaaatggcatgaagaaaatgatattctcttctgtgctttagctgtttgcaagaaaatcgcgtactgcatcagtaattctctagccactctgtttggaatccagctcactggagctcatgtaccactacaagactatgaggccagcaacagtgtgacacccaaaatggttgtattggatgcagggcggtaccagaagctaagagttgagagtccaggattctgtcatttcaactcttacaatcaggaacaaagatcaaatacatctactggttattatccatctggggtgaaaatttcgggccctcacagcagtgttcgcggaagaggaattacccgcttactagagagcatctcaaactcctccaacaacatccatagattctccagctgtgagacttcactctcaccttacacgccccaaaaagatgggtacaaacctttctcctccttttcttaatgatggtactttgtgcgatttctggaaaaataacaagccaacttcctttctgactacagtcatattaacaaacatcacatcaatagtaaatgtcactcctaaaacctacttaatttgtaaggaaactatttcatagattaaaagtaattgtggttggagaagatcttggcactctt

SEQ ID NO: 303 - protein, 434 aa, Mus Musculus
MPNRRASRNAYYFFVQEKIPELRRRGLPVARVADAIPYCSADWALLREDEKEKYSEMAREWRAAQGKDSGPSEKQKLVSTPLRRPGMLVPKPSISPPDMSNLSIKSDQALLGGIFYFLNIFSHGELPPHCEQRFLPCEIGCVKYSLQEGIMADFHSFIHPGEIPRGFRFHCQAASDSSHKIPISNFEFGHDQATVLQNLYKFIHPNPGNWPPIYCKSDDRARVNWCLKRMERASEIRQDLELLTVEDLVVGIYQQKFLKEPSKTWVRSLLDVAMWDYSSNTRCKWHEENDILFCALAVCKKIAYCISNSLATLFGIQLTGAHVPLQDYEASNSVTPKMVVLDAGRYQKLRVESPGFCHFNSYNQEQRSNTSTGYYPSGVKISGPHSSVRGRGITRLLESISNSSNNIHRFSSCETSLSPYTPQKDGYKPFSSFS

SEQ ID NO: 304 - DNA, 46700 bp, Homo Sapiens
ggcagcgcggcacggggcgagcgtctccccgccgcagagcccgccgcgcgggggagctcggccgccgcaccgcctcccgcgcctccgccccgccgcccgctgccgcgactgccaaagtttctcggtcacgtgctggcccccggcggcccaaaggtcagcgtggagtgattgaggccacgcggagagagggggtctctgggtggcaggcagcgagaggcgcgggggaggccgccccgcgggccgcgccgagcggggagcgaccatcgcggcttctcccagggacgcccgcgctcgggaacccgggcgagaacgctggctggggactcgagcaggggagcctgtgtctgcgggcagccacagccaacctgaacggggagagagtgacagcggcgagggtgggggacggcggggacttggcgtaacttcttacaggacttaactagcaagtcctctaggctagaatgttcgcttctgcggtacccccgcccctccgtctggtttcctttttgacagtgcaaggaaccaggcaagaggctccgcagaattgaaaaaggtaggcgggaatctcgcgtcattactttttcctgttaaaatatgaggtagaataagggcatccggccctttaacagaaaatatgtaaaaccagaatgagataaatgattataacggcttaaatccatccaacactttatagattccagcacgcattcacatggattattcctatttgtcagacggatttgtcttgtgtctcaaaatgtatgtgttgagagagaactgagaaatgtatgatttgcttaagaaatatatttatgaagcctctactaggtgctaagaactaaggttacaaagtggaatgagatagacttcctgcccttaggagcctcatcttgggtcgaggaaagggaggaaggtcagaccattaaagacatgatacttattcctagtaaaacggggcaagtgcaataatggagacatagagaaagtgccttgggaacatagaggaaggactaagttagtcgtgggtggggagggggcaccacgataaaggaggggtaacatctgagctggcatttgcagaaagcacaagatttgagccattcaaggatccctggtggaaagggggcaggcgagggcattctgggcagaggaaagagacatagcagaaaggtctcaagtagcatctgaaaacagagtggtgccaggctggaggggagttcctggagcagacagactccacacctaagagtgaatgtgtacacagacagggagaatatgtatgtgaacatgtgagaaatgggaagaatagaccctgggcagctgtcttttatggctgcctgacatctcaattcccttcttattctgagaaattccaactgcagaagccagaaagtctagagccacctccctgaccatcccagctggaatgcaggcccgggcccctggcatagccaggctgacctctccctcagagctttttgattctggagcaagtggtggatataagaaacaaggacagtggagaattgattttgtcactgaggcagcagcagcatccagtgtacatgatcagctgtggcagaggtcaagccaccaggatgctccaaggtgtgatttttggctgtggtcttgcaggctctctgggttctagcctctcttctacacttggctcttcacttccccagcaattctttgagccacccaatatcctttcataaactctttctttgcttattttggccaggatgattttttcatgctatgtactgcatgagagaaatttgaggactatttcctttcatatacagaaaaataaaaatataggaggtacctaacacttgtgggtttcctttaggttctaggcagagttctacatgtttaacaaaccttctcatttaaccctaaagagggaacttaggcccagagcatttaactaacttctctaagatcaggcaactagtaagtggcagagctaggatttgaatctgactctaaagcatatactgtttgcaccacaaaaagaacatctacaccagaagattgagatgatatatttgtattatgctgtgccatttactgcatctatgtgtgtgtgtcacagtgcacaaaagagcttgaatagtgtttattatctaagcacacataacagtggcattttggccaggtgcagtggctcacacctgtaatctcagcacttcgggaagctgaggtgggcggattgcttgagctcaggaatttgaccagcctgagtaacatggtgaaaccccatctctacaaaaaatacaaaaattgccaggcgtggttgtacatacctgtagtcccagctactctggaggctaagatgggaggaccacttgaacctgggaggttgaggctgcagtgagctgtgaccacgctactggactccagcctgggtgacagagtgagaccctgtctcaaaaaaaatggcattttatgcaaaacttggacatatgagcaagtttatacatgtgaaaaatgggagatggactgagtgaaggaagcctggatgtgtatatgaagtggaacgtgaatgcccacagaaatgaactcatgtctgctcagaggaggtgtctgtgtagttgaatcaggagacttggagaagagcttgtgccacaatgaatcatagaatgcagttgccttgtccatcatcccagaaatgtgttttccatgtagtgccctgcatgtctactttatagccagagaggtacacatggtgtatcctgaatcttcctgagtgagtggcgcccaggccatcctgaaggggatgctaaactggagtgaatcacaatgtgtgcccctccatcaccttgcacatgttgttaccaaggtgatgaagggttaatataaattttgaaatatatgtaatgattcaaaacatgtagcctaagggatggaggtggaaagaggatgggaaaatggtgttattttgccatattggtggtgggtgatgggatatggcacccagagtcccaatgtggtttctgaacttccagtatcaggatcatattactgtgtttgcttaaacacagattcacaggctctactaagaataatgagctcagaaactccaggtggagcccataaatctgcagtttaaccactttccccaggtgcttccaatgcacagtaatgtttaagaagcaatacctatctttttgttctcctgagaagctgttgagctgatgttttctaatgagccttgtatctggttaagctccagttgttcattcattctgacctaataggacaggaccccaaatagagagattgattcatcacagccaaggaaggggtctggctctgcaatacttcaaactttctactgcaatgagacaaacatgtcacaacaatgacctgtatgggaccagaacaagattcccaggaagccacagctgggattgtatgtggtggggggactaacaggctgcttcagcaaagctctacactagagaacagaattaggacacagagaaaagagaagtgaaccaccacaaggagacatactggtagctggtagcaaccacatagttataaatataatgtagctgaatcctctttaaaacatgatttcattgcagacacacaggcatgcatgcacatgaatactgcttaacgtgagtctgtttaaagcacacagataaaatcatatttctacttctcctctctgatcctgcattccaagaggaatatacgaagtatgactctgaaacagataccatttttctcatgtaagtttggtccatctttttttttctcttgctaccttttgggtttgttatctttcccatcctccataccttcaaaaccatcctcaatgaattataagttaaaaaaaaaactaaattaaaccaaggaactaaaaaaactggaacccagaaaaccaaggaactaaaaaaactggagactctaggcaccgtatactgaaaaccaaaaacattttcaatcttgaagtcttttcatgttgaataaattgtttgattaagaaaatgctttaaagaaaggaaatgcaagtatacaaatgcattatgccaaaacaaaacaaaacaaaatctgaactggcaagaacagtggacactagacaccacactatctagaaatttaaaaaggtaaaagcctgggagaatgtgttgaaaattccatgtacttccagcagatttaatccaagaacctgcagtctcaggcttcaaatccaactgcagtggtgctgggtgctgaattaggtgatgctttgtgtgccccatcctaaagctagatcctgctcaacagtgggggcagcccttgcctgaattagctctctaccaaagcattccctaaaaaggtccatccaaggataatgtgcagaaaaaaagaacataaaagtatatttagagcttggtatcaaatatgaaaaaatacatttaaaagggacaaaggaaataaatgagtaacaatggttatctctgggaagatcatcattcatttatattttttctttataattgtctttctttctttcttttagagacagggtctgactctgtcacccagactggactgcaatggtgccatcgtagctcactgcaaccttgaactcctaggctcaatgctatcctcctgcctcagcttcccaagtagctgggactgcaagtgcatgccaccatgcccagctaatttttaatttgtatttttttttttagagactgcatcttgctatgttgcccagtctggtctcaaactcctggcctcaagcaatcctccaacctcagcctcccaaagtgctgggattacaagtttgagccactgtgcccagcctataattttctataccctctaatatttctataatataggaaaaggtgctggacaaaagctgtgcccatgccaaaatttactcattgtgaatttgtcctccagtctctaggacatccctgcagaaaggagagaagcaaggagaaggagtgacaggtgttttgtcaggcctgtatcttcagccagatacaaagcccccacatgtacacctgctctcattatgtctcattcgtgagcagttaatcaagttaattatgagcagttgagccctgggagcttttactgacagtgcaacctataatttctctgaaagttacagagccagagatgaaggttactgctcttttaggagccctgtctccagtttttgcttttgtttctgtttttatttcatggttagcatcctttggagaccagaagagcattgacagccccccagatgagcagcagagcaattcttatactagtggtcaagcagcttcctacagccaaaaggctataggaagaaagggtaactggctgccctacagtttacacgatgaagctgccttgggctctgggtcttggtgatttagccagaagattgtttctcagagctcagccctacacattctcctaaaggccttcttcctggcataggtcaaagacagaacctgagagagggaaatgagccagaacaaatatgtcatctgatgacctcacccccagcaaatgggcagggaagagagctagaatgagaaggccagaacatggagcaccatgaaaagaaactgctcaagcaagagaagtggcatgtgggctttaaagaccagggttagaaaacagcagccctgacctttgtgttgaagtagcggggcgaggatctctcatagaagtgttaattctgtactccttccccaattctgagtaggtgccttttacatagagatgatcaatgtgtacttgtctaattaattacaaactgcccccagtgtattcatcttaccttttcgtcatctctccttttcttttccctgaattcattcatttattccacacatttattgaatacttactatattctagacactatgctatctagaaattaaaaacgaatatgaattcaaagatgaatgaatcacagccccttatgtcaaatagcttacatttgagttgtctccatgtgtgtagagagggagggagggaggcaaatatgtggtctttatgatggtgtgacagggcctgtattaggacatgtaccaaatatggtaggaaaattaagtgggggagggtcaattagttatcagtagtcctggtcagagatatcttcatgaaaaggtgacccctgagctaagctttaacatcatctggacagaatttctaggggcagaaagggagcaggaggtagtacagatgcacaagcaataggcagaggtgagaataggaactgctgcccagagcataggtttacaaaaggcagagtcagcaataaggctggaaaggtaggctgaggttgaaccaagggaaaccaggatagcagatttggatgtaattccaccggcaatgtaccatccatgagaatttctaagtagaacaagatcagacctgtgtcccaaccaagttattctggccacagggtgtaggatgaattgatggagacagagacaacagattgaggtctcttccatgggagagctcattacaagagctcaagaagtaacaagcacctaacaaggggcagcacgaagagaatgctaacatcaattgagaaagacattgcaaggagtcacaagaggtagaattcacatgtatattgcaagcaggaggaatcaaccagacatcaggttgagttactaaagatctgagagcacattcaaacaatgtctagatggtactcagaaatttatcacttaactttggcaaagcatcaggtaataaccttgaacatctaagataaacagattggaatgagtgttaacttgggatctcatagatgtcaaagtcactcaaaggctgtgtggcatgtggaagtcacttcaccactctaagcctcaatttccttttctgcaatatgtggataatcatggaatctatttcatagggttgttgtgaaggggagataagataacccttgtggagtgtttagcagaaagctggatgtagcttgcaatgaatgtcacctattattactactattattattattagcacaggagggaagatgcacgctgaataatgttggccttcacttaaactaccatcaggaaaaaactcagccacattttccaagaacacttgtggtgctcttcagtggtttgcataacacgtacctggttgaaaatcacaccttatacttaattaaaaaaaaaagtaatagtcatccaaatctccagtggtttcccccaatttagacaaaaatctaaagtccttatggaggccctgtaaatcctgtatgatctggccctacctccctctctaatattctctctactttccccctcactcactttactccagccatgtgacttactttgcttttcctcaaacatacctgatatgctcccacctcagagcttttgcacttgctattctttctgcctggaatgctcttctccagatatcttcatggtttgcttgctctcttccttctagtcgttgctcaaatttcatttcttcatatagggcctttaataaccaccctaaaattgtaccctctaactgttgctattcccttatcttacattatttttcttcattggacttattgtccaaaaagatattctgacatcttgttatatacataatagtttatttatttattacctgggtttttttccactataagcttttttctattcaacctattgtgcttaaaatagaggctggtattcagtgagctcttaataaatatctattgaataaatgaaccacttgctactggaatcactcccctctcttggttttcctgcctttcttcctactttttcacatgttcttctcagtcatctttactgggtcttccttctctggcttctaaacgctagtgttcctcaggactccatcctggatcctttttttctctctcttcactctctccttagatgatctcatctagttcatgaatttaaataccatctttatgtggcttacttctggattctttctcaagcccagaactccagacttacatggtcaattgcctacttgacatctccacttgaatatatagtaggcatctcaaaatgaacatgtccataatagaactcttgatccaccccctccacatatttcaacccaaacctgccaccctttagaatttctgaatagaaaaaaatcaatctggttggaaaatggggaaagctgttctgtttatgtaggacttaagtaaaatagaaaaaaaatcaattttatcaaagaaggagaggagcagtggctcacacctgtaatcccagcactttgagaggctgagacaggcagatcacttgagcccagaagtatgagaccagtctgggcaacatggcaaaaccccgtctctacaaaaaatacaaaaattagctgggcatggtggcgcacacctgtagtcccagctactcgggaggctgaggtgggaggatcacttgagcccatgggactgaggctgcagttacctgtgattgcaccactgcactcgaacctggttgacagaatgagatcctgtctcaaaaaaaaaaaaaaaaatggacctatgaggagaggagcagataacagaaattattgggagctttggaccttggaccctccttggcattagcactgtctccctctgccccaaagtcctccctatcttagtaaaagcactaagtgcccatgggttactcaagccaaaatcctaggactcctccttttttcttactcctacaaccaatccattagctagttctatttttcccaaaatacaatttgagcccagcctttcctttctgttcgaggttgccatcatcacccacatggactcctgaaggagccttctaactggtctcaccatgcccattcttaatgctttgaaccctttctccaaatagaaaacatgacatgttttttaaaaacccttaaatagagtagatctcaagtgttctcaccacaaaaaagtataagtatgtgaagtactgcatatgttaagtcattcgatttagccattccacaacatatacatattttgaaatatgttgtacacaataaatatatactatttgtatctgtcaattaaaaataaataaataaatataaaataacccccctaaatgaacaacaattgtacttagagcaatactcgaaccccttacaatggtcatggtcaagccgaaatccctgttgatcactccaacctcagcaggcaccattcttcacctgactagatacagtacagcaacactaactagtcttccatctgttctgaagagacacccaattctttatcacctgaggcttttacacatactgttccctctgtctagaactctcttctttcaattcttcacatgactagctctattccgtccatcctttcccattataaaagccacctgctcctcatagaggtttgccctgttcacccatctaaatatttggtagttaaatctagatatggttttaaaaatgttaaactatgaaaaagccatcttgcccaaggtggagtaacaggaaatgaatgtatccagtagcttgaaacaaaactgcaattacttttgcaccaacctaataaaaaaactggtcaaaatatatgaaacaatgtttccaaacactagacactggggagtagagatgagtaacccctgaaagaaccacagcaaacaaggtgagctctgtgattgccacaggtagctgcctggagagagtaccggaatgcagtatcacaatgggttacctaggcagagcccagtggagtctccttgagttgaggagatggaggtgggtgtcaaggtgcgccacagtggatagagtttgcagggcagagtaccagaaacaagggaacagcacaatcaccaaaaaaaaggctctggagatatggtaaggatctcccttgaagcctgagctgaatactgatcagtgcatgtgtgggaaaaaactacacagagccaaagaaagaacaacctgaaaggattacaagtaaccatccttggaattcacataggactagaaatagtttatattcccatcagccaaagtggaatttggctccaaattttatggaatatcaagtacagtactcagaaagatgttatatcagtagaggagaaaattagccttaaagattgctctgatctcaaataacaaagcagaaaagtaagcctaaaaagagtgaaaaccagactcaaactgtttccaagtaacagaactgtgtcccaaaacaaagcccaaaaatgtttataagaatatagaaatatgcagcattaaacagggtaaaatttacaatgaccagcatccaatcaaatattaccaagcatacaaaagaagcaggacaacataatccataagaagaaaaatcaatcagtagaaacagacccagaaatgaaacagataatacaatgagtagacaagaattaatggttatcataattatattacatgttgcaactgtattccatgttaaacaacgtaaaggaaggatagactatgttaagtagagatatgcttaaagatttttagattttttaaaacgacccaatcaacttctagagatgaaaataaacaatctgatatgaaaaatacactggatggaattaatgcagattatacattacagaataaagtattactaaacacaaagacaccaatggacactatgcaaaatgaaacagagaaaaaagactgaaggaaaaaaatgaagagagcatcagtaaaccatgggcaacttcaagcagtgtaaaggagtagtgaggaaactttaggggatggatatgttcattatcttgatggcagatggtttcacaggtgtacacgtaagtttaaattcaataaattatacactttagatatattgtgtttattatagttcagtcatatctaaatgttgttataaaaaaaagcaatgtgaaattaaaatcccagatgataccaacatgggagacagaagtgggacggtggtgcgtggagtgagagagtctgagtgggaagaagtaataattttctaagctgcttgtctgtttgggaagaggggatgtgaatacctattagctgtaaaagttgtgataaaaatgtaagttttaaaacaagtacactaaaatttatgggtaacagcagaatgaagaaaaatagaatgtataactttaaaaccagtggaagagaaagtacagcaaaaaatagttatcaatccagctcacgcagagaagggaaaaattagaaacataataaacaggcaagaaaataaattgaacaaagctttttattcaagaaactaaaaaaagaaacataaaacagcctgaagtagaaagaaggaattaataaacttaaggcagaaaagtgtgaaaaggcaaagaaaaactgtaaagtggatcaataaaatcaaaagtgttttttaaaagatcaataaaataaacaaaatttggcaagtattaaggaaaaaatctggaaggcataaataattaggaatgaaaaggaaggggacgtgtgtgtgtgtgtgtgtgtgtgtgtgtgtgtgtgtttaaaattacaatcaactgttacatttgtttttatgccaatgttttttaaagtcaactttattgactttaaaatgaaacacacctattttaagtccatagtttgatgaattttgacaaatatatactactaatagccaccaacaccacaattaaggtagagaacatttctgacaacccagaaggttccctgtgtcagttctcaatctcccctccccacctccgggctccaggtaatgctgatctgatttttataactacagttttaccttttctcaagttctgtatacattgaatcacatcctatgtatacttttatgtatgccttctttcactcaacaaaatttcaaaattcatccatgtcgaatatcaatagctcattccttttcattcttgagtagtagtctactaaatgaatgtgccacaatttatcagttcacctgttgatgaacatttgggttgtccagcttggagctcttatgaatagtgctactctcaaaattcatctacaaggctttgtggatatatattttcattttcctagaagaatggaattgctgggtcctatgataagtataagaaactgtcaaccagttgtcccaccaataatgtatgaaagttccagctgcttcagatccttgccatattttataccaatacactagaaaaatctaaatgagatagacactttttctaggaaaatataattacaaaaattaggtgaataaaactaagaaaactgagaagactaataaccatacaaaagatattgaaatggtagttaaaggtggacgcaccctccaaagatgtaaaagatcagagagttttactaataagctctaccaacctgtcaaggaatagataattcccatctattattctatctgaacacaaccctgataccaatatttggtaaagaaaataccacaaaatctatacagttcaatattactataatcaaggaagccaaaattctatattatgttttttaaaaaataagcaaagcctcatgatcaacaatagtttatactaagaatggtaggctgcatcgttagaaaactagcaatattctttatgttaacaaattaggccaggttcagtggtttacgcctgtaatcccagcactctgggaggcctaggcaggcagatcctcgagcccagaagtgtgagaccagcctgggcaacatagggagacctcgtctctacaaaaaacagaaaaatcaccagggcctggtggtgtgcacctgtagccccaactactcggggggctgagatgggaggtcctacttgagcccaggaggtctaggctgcagtgagccgggatcgtgccactgcactccagcctgggtgacagactgagaccctgtctaaaaaaaaaaaaaaaaaaaaaaaaatttaaaagataaaaccgtgtgattacctgaaaagatccagaaatttagcaaattttcaactgccattcttgattttaaaacatatacataccccatatatacatacacttagaaagctgacccgagaaaggaattttctctgggaaacgtaattagaaaaccgagagaaccaactagcacgatgtaaactagtataagagatcagcagtgtgactatatacacaggaccaacactaaaatcaataccttctctagacatcagtagtaatcaattagaaaatataattttttaaaagaaatttttcataaaaactcatattgttaattaggaataaaattgacaaaaaggaaacagttttatgaggaaatctataaaactttaaggatattttaaatctcaacctcttcctctgtttccttctaacacttatttttgaatgtacttttaaaaaattcgagttttgttgcttcactggtttttgtcatcctctcccctcattcgattgtaaacttgagggcaaggaagaccttgtcatgttcctcatacatgttcctcaacacttttcacagtgcttggcataaagctggctggccctttgtacctgtaaaacgcggaaacacccgcagctcctctttttctctacctactttgtcgcacattacgcaataatgtacagaaattgctccaggcctcccacgtgacaatgcctccgcctgccacgcacccagccaatcagagcacttggcacctgcgacggcgctctccccccacctcacccgcaaggcggcacgagccggaatcttccagtctcaggctgtttgttcccccgcggggcaatgcgactgcgcgtcgcttcctgattggccgagagttgcgggctgcgtgcgcaggcgcctacctctgttacttagggcgggagcccggcgagggcgccggtgctttgttctgtctgaggccaggaagtttgaccgcgctgccatgccgaaccgtaaggccagccggaatgcttactatttcttcgtgcaggagaagatccccgaactacggcgacgaggcctgcctgtggctcgcgttgctgatgccatcccttactgctcctcagactgggcggtaaggctggagcggagtgagagggctgggcagggcagttgggcaagccggagggtgaggcgggagggcagaaggcctcgaggaggtcaggcggcttggccctgccagaggaagaggaaggcccccgtttgtggccctgggcaaaccgacaccagaaccacctccctgtaatgccccagcatctgcctgcgggccctagagcacgggatcctcacggctgtttctcttctttgctccttcaatccccaaaagcttctgagggaggaagaaaaggagaaatacgcagaaatggctcgagaatggagggccgctcagggaaaggaccctgggccctcagagaagcaggtaaagttaacgagagaagagccgccatctgcctggcacataggcatattcagtaaaggctggatgagtgaatgagtgaatgtcaagggtggactgctttgggggttcggttagtgcgaagacgacgttcttcttttcccctggtgtcagaatgcctgttaaaaaaaaccaacagcctccacaactagggcatgcacacattggtgtaatttgatggtgaaaggcctggggaattcctgttaggaaacctgtagacaatacactttgatcgctaatgggagtgtaacatctaggggttgtactagatgacatcaaggtgtccctttcaactcttctgtgattaatgagccttggcggggggtggggggtgggcagtgggggcttaaaactagtttagaccattctgtctttttttctttagcaaaatataccattcttttaaaaatgacacctgaaacaaagccagctgctgtgtttaaaatattgaaataacaagacttggattagttggtgtatgtgtgtatgttttacaagagttgaataggctgggcacggtggctcacgtctgtaatcccagcacttcgggaggcggaggtgggctgatcacttgaggtcaggagtttgagaccagcctggccaacatggggaaaccccaactctactaaaagtaaaaaataaaaaaagctgggtgtgatagcagacgcccgtggtcccagctactcaggaggctgaggtgggagaatcgcttgaacccgggaggcagaggttgtagtgaatcgagattgcgccactgcactccagcctgtgcgaaagagcaaaactctgtatcaaaaaaaagaaaaaaaaaagttgaatgaagtttatttgggtaaatttctgtgtagtagaatgttaaagtactaaataaaatttgttttcttgttgatttgtatcaggaaagtgccaggtaattgttggtgctaccctaccctttgttttttccattcttacatggtaaaattccattcttaaactgtcaacattggattgaaattcaagagatagttttattttgtggatttatgagtagaagctcagttgagcttgtacttatacttgcaagccttattcttacaagatatctctcctcaaaactaaagctatggtgtatgtgtacctcatgtgagacttggagacaacataatctggttttgactttaagtgaaaaacaagcaaaattagagtactttggggcatagtgtgcttttggccactggcctggcatgtagtaggtggctcaggatgattaccttggataatcagtagtgggcaaaatggctttcagtagtagtggcattggttatttaccactccccttctgattcagaatatttataatttgttattctgcctttgggtgttggtattattgacagatatatttattcactggattcattgaccttggtaatctataggctgttttgcagttatttagctaaattttaatgtatggtctaaaagtgcccagcaagagtttatgtggccaatcattctcttcctctttagaaacctgttttcacaccactgaggaggccaggcatgcttgtaccaaagcagaatgtttcacctccagatatgtcagctttgtctttaaaaggtgatcaaggtagagtaatcctgaaatattttgctgagataaatttgagtgcccaaaacactatatttgtcagtaaaaatattttctgttcattttgatcctccgtttcaaagtaaataactgcaagtgttaaatattgtggtactgacattataaaagattaggtaatttgttgaaataaaataggagagtggttttttttttaacaaaaatctgttctctgtttctaccactttatatgttgttaaacataggtattttttagacttgtttataattggacacttaaatatacttaagttaaaaacaaaagtaaacaggtggaagaacgttttcagatctgttctacagtgtgatgactacgttaatgtatgtttcaaaattggtaagagtaggttttacatattcacaccacaaaaagtgaggtgatggatatgttaatgagcttgatttaatcattccacaatgtatacatgtatcaaaactacattgtacctcataaatatgtatataattattatttgtcaattaagaataaaatatttaaaaatcctgggtggtggagggggcttataaagatacaaatgaattatggaacttgccaagaagagaacatagttaataagggttgttgctattccttctggctgtttttattgtgttctgcctttgttgaacactggtaaacttttaacagtcttaaatgtgtccagtcttggtaaataacacttcacacattctcacattcctttattcctttagaggatttataggtggttttatatatattggtaaaaagtgaaaaaagaatgaactgaattgttcatagtttatattacaatctttctacattgattctgctcagcttcgtttcccagacctatatatttgttgaatatgggtcactgctctgtgtcattcctgagattcagggcttatctatggccgaattatgtagagctggctgcaagttggaataattttgttgcttcatgcaaagagtggttactttaatccttgataattgtaattataagaattttgatttctttatttggtacggctgattggttttctcttttccagctcatttaggaatataggaacagaaagaaaattgttctaaaacattttttcccttcaactaaagaggcttttgtggaagaggtaaatttgagacattcatttattcattttatcttacaatttttttttagctctccttggaggcattttttattttttgaacatttttagccatggcgagctacctcctcattgtgaacagcgcttcctcccttgtgaaattggctgtgttaagtattctctccaagaaggtattatggcagatttccacagttttataaatcctggtaagtagtcagagtagatgctagatcttaaacgtgtatggtttttttttttaaatcttgactttatttgataatagtactttttcttacaagctcatgtacagctgtgttcttaatgtaacaagacttcataatgcttattgaaaaactgttaggaattaggtgttgacaaagggttttttggtttaggcttttaacctcaagttaccattaaaatcagatggatagactatctgaacaattcatagcctgctattcacctacctatggccttacatcttgggattttctaaaagccgtgtatgccatgatcttttctttttctacctcatccttcacctcagtggtgactagctttttaagctgctattgctttgtagccttgaagaaattacttaacccctctgaacctattagctcatctgtaaagtggggataatatctattggaggattgttctaaggaatagatgacaaatatggaaatagcctaatacttaatcagctctcagatattatcagcatctcttcctactgttccatcccattaaaaagcaaggtaggtatgaagacataggatttgatacccttgaaggtaagtaggaaaaatatatagggagaagagattggggacatgacttcatttttagttttgtcaattatcaattactttaaaattaattaggacatcccagcactttttcctcatttttagatgacagaaaagctaatcatcctactcacacttgtgagtgttgctacttaggacaagtcaaagagctgcttttccccacatgggttgtaaaatattaaaaagatagaatttggggactgtttttcctctgagaaacgcatatacaccttgctgtatcaatgcccttatgaccccctgaggcccattcatggacgtggagctaagactcttttgacacatgctttctttatctagcatttctttctctgtaaggagtaacttacttttaaaagtagcttagacaatataccaaattctttaacagttttcatacctttggttaaaaataaaccctataaaagtttaatcttttgtattttcatgtaataaaaattacctttctgtgtgataacttggtcatcttgtagagtattactgtagcactagagaactttaaaatttttgcttctcaacaagatattttgtattataggtgaaattccacgaggatttcgatttcattgtcaggctgcaagtaagtataaaggaatggggtaggatttgtgacttgaatctattcatacctggttagacttattccttttacacacaaactataaaataagaggaaaataactttaggttattgttagagaatctgcatagatgtgatagatggtgtctgtgatctttaaattttttatagactgatagtatactgtcccttttcttttcagggaattgttttattttctgtatatatcctttgacctcaaggttggctgttcttagtggctgggtacttaggaaaaccttttaagaggtctcagattatctagatttaggactgttttcagggacatccatttcaattgtgttttataagttaatacttcaaaaataaaacgagttctgaattttttagataaggaaaacagttttctaagtattttgcaaccaaagggcatgactgtgtatatctaagcccttgaactaaaccctttttctgggaattaggttttaagtgattttctgcttaaatagaatgaaaatcggaataggtttatttttaaatgtatattaaaagtgtcagtgcatagggactatttaatgattcctgtctgtaaggtaattttttttttttttttttttttgagacggagccttgctctgtcaccaggctggagtggaggggcgtgatctcggctcactgcaatctctgcctccttggttcaagcaattcttctgtctcagcctccggagtggctgggactacaggcacatgccacggtgcccagctaatttttatatttttagcagagacagggtttcacgatgttggccaggatggtctcgatctattgaccttgtgatccgcccacatcggtctcccaaaagtgctgggattacaggcaatgagccaccgtgcccacccagtaattttttttttttttttttttttgcttagaaacgtggacagctagcctctagaagtgtttgaaattaaaaataagtttttcaaatctgccacaaccagcagctataatacttacaacactgttctttataaatgaacatattttggacttatatttggttgtatattttgaattcttaatatgtactaattctttatttgtttgactggaatcagggctgtaggctatggaataagaaatgtaagggagaattgttctagtagttccttttttgtttttttttggagacagatttatgctcttgttacccaggctggagtgtaatggcacgatctaggctcactgcaacctccgcctcctgggttcaagcaattctcctgcctcgcctcccaagtagctgggattacaggcatgcaccaccacacccggctacttttgtattttttgtagagcgggggtttctccatgttgatcaggctggtctcaaaactcctgacctcaggtgatctgcctgcctcaggctctcaaagtgctgggattacaggcgtgagccaccgtgcttggcagtagttccttcttatatagctttgaatggaaagtaattacaatatggaagaaaaattctgtacttgctttaaagtgtgaacatagctaatatccccaactgttacatcatctgaggttattgaactagatggcagttaaaaaaaaaaaataaaaaaaaaatggaaacttagccggtgaattaattttcaagttttacttagactctgtttcaggtttattcatctgttaaatgcattggaatccctactatgtgccagacattcatttctgagactgtcactggcttactgttcctttgctattttgattctgttaaatccttcttaaaaatctatttttgacgacctatttttacaaccttttcaaattaatcagattaacagaaagcatggttctttaaaaaaatctattaaagattctagaaatgttttcttaatttattattcaacctagtcaaaactgagtacaatgtttctcattccaggaaacttaaaatgtttggagcttaccaatttgagtgtgtcttaaattgccaatttgataatcccgggaaatgtgccaattaaataagataaaaatgactattagagtcacacctgtcaccataataactaaaaatgcctatgctaatgtaattgagctgatttggaggagaccatgttttgtatagtaacacactggaacaaatttacatgtggatgtgaagaatttgagtggtatttaaggaacatgcatatggatctctcaaatactcctgtgctgtctgatcttttatgaactatgagtgagagtataggaggtcctggtgcttctccttccccactttaaccagatgagctctgcttctctccaatttactggttaatgatttttcttgagagaaattctgctttaaaacatcaaaattttgaaaattgctttcagcttcctatacaaaaggtccatcagcttttcaaaggaagcttctacacacagaacagattataacatttatttaaggtataacgaacattaataaaaaagcacccacaagtcaactgaaaaaatagcacatttccagtgccattgaaagtccctgtatctctccctgatggcattcccttccctctttatgagaaaattacgattctgaattttgcgtttgaattttgtgtatttcttttctgaatagttttactacatgtacatatttgtttaaatgatgtgtttaattttacttgtttcaacatttatgtaattaacatattgtatgtttcagggtgcccaatctttgggctcccgtgggccacattttttctttttttaagacggagtcttgctccctcgcccaggctggagtgcagtggcatgatctcagctcactgcaacctccgcctcccaggttcaagtgattctcctgcctcagcctcctgagtagctgggattacaggtgtgcatcaccatgcccggctaattttttgtatctttagtagagacagggtttcaccatgttggccaggctggtcttgaactcctgacctcatgatctgcccgcctcggtctcccaaagtgctgggcttacaggcgtgagccaccacgcctggcccccctgggccacattggaagaagaattgccttgggccacacataaaatacactaacactaataataactgttgagctaaacaaacaaaaatcacaaaaaaatcttgtaatgttttaagaaagtttatgaatttgtattcggttgcattcaaagccatcctgggccgcatgaggcctgcatgccgtgggttgtacaagcgtgatatatatatttcctttcctgtgttttttaactcaatatctttcactcattttctattgaatcatttgtttttcttactgatttgaggaagtttatcttatctgctgatggatttttaaaaattgtgtgcagatacctgttttcagtttgtgtcttgtattttttactctctttatggtgtcttttaatgaacagactttttaaacattttttgatttttagagatggggtcttgctttattgcccaggctggagcatgatggctgttcacagatgcagtcgtagctcactgcagccttgaattcctgggcttaagtgatcctcctgcctcactctcctgagtagctggaacttgaggcatgcacaactgtgccagcttgtttttatttttaatttggtaaatgtgtcgatattttttatcatttatggcgttttgtgtcttattcaagaattctttaccccaaggttgtgaaaataatctctatttctaaaaattatagagctttattttttgtattcaagttgttattctacctggaattgacttgtgtatagtatgagggagagattcactttaatttttaaccatgtggataatcatttatcacagcatcatttattgaataatcaatttgtaccccaatatgtagtgccacctgtatcatatcatgtttctgtttgtgtgtaggaggatcttttgttctctttattctgttctgttctacttttttgctgtcaatatcatattcttaaacacagtagtttgatgatatagataagcccccgacctcattcttttggaatatcatggctgctttgaccctttgttcttccatacactatttagaatcagttcttcatgttttacattaggtcattttggagaaaactggtatcttcattatattgaatctttatatttgtaaacatggggcttccctcttattttttagatccgtaatatctttcaataaaattttataattttctccattaacaatctgaatatcatttgttaaatttatagtttatcatgccttttgttgctgttacaaatgatatcccttgaaattatattttctaattgtttacttttatattttggttttgtcccacccattggtaaactcttgagtttttagcagattacttaatcatatctgttaaatcactttgttctttctaatctacatatcttcatttaaaatttttaaaatttgctttgtcttagtatgctgaccagtacctctagtttctagtgtttcgccagtgagtatgctatttgctgtagtttcttctttctctccccacccccgtttttggtgtgtgctctttatcaggataaagatgtttccctctacatgcacaccttgttttattgcatttcactttattgcactttgcatatattgcatttttttacacattgaggtttctggcagccctgcattgagcaagtctattggcatcatttttccagtggcatgtgcttacttttctctgtgtcacattttggtaattctcgcaatatttcaaactttgtcattatcatcatgtttgctatggtgatctgtgatcagtgatccttgatgttactattgtaattgttttggagtgtcatgaaccatgcccatataagatggcaaatttaattaataaatgttgtatgtgttctgactgctcccctgactggccattgcctcatctctttccctttccttgggcctcactattccctaagacacaacaatattgaaattaggtcaattaataaccctacaatggcctctcagtgttcaagtgaaaggaagggttgcatgtctctcactttaaatcaaaagctagaaatgattcagcttagtgaggaatgcatatcaaaagctgcagtaggccaaaaactaggcttcttgtgccaaatgaccaagttgtgaatgcaaagggaatgttcttgaaggaaatttatgtactactccagtgaacaaccaatgataagaaagtgaaacagccccattgctgatatgaagaaagttttagtggtcagaatagatcaacattctccagttaccacattcccttaagctgaagcctaatacaaaacaaagccttaactctcttcaattctgtgaaagccgagagaggtgaggaagctgcagaataaaagtctgaagtttgcagagtttggttcatgaggtttaaggaaagaagccatctctataacataaaagtgcaaagtgaaggagcaagtgctgacgtagacgctgcagcaagtcattcagaggatctagcaaagataactgatcaaggtggctacagcaaatggcagattttcaacgaaaatgaaaccaccttctgttggaagaagacaccatctgggagtttcatagctagagaggataagtcagtgcctggcttcacaggacagactgattctcttgttagtgactaatgcagctggtgactttaagttgaagccagggctcatttacccattctgaaaatcttagagctcttaggaaattatgctaaattgactctgcttgtgctagtaaaaatggaacaacaaagcctagaagacagcacatctgcttattgcatggtttactgaatattttaagaacactgttgaaatctgctgctcagaaaaaaaaaaagattcctttcaaaattttactgctcattgacattagacctagtcatccaagagctctggtggagatgtaaagagattaatgttttcatgcctgctaccacaatattcattctgtagcccatggatcaaggagtaatttcaactttcaagtcttattatttaagaaatatgttttataaggctatagctgtcataaatggtgattcttcttatgaatctaagcaaagtaaatggaaaacctgaaaaggattcaccattctagatgccattaagaacatacataattcattggaggaggtcagaatatcaacattaaaggttgtttgcaaggattagattccagctctcatgaatgactttgagcagttcaagacttcagtggaagaagtaatagaagagaactagaattagaaatggaacctgaaaatgtgctgcagtctcacaataaaacttgaatgggtaaggagttgcttcttatgggtgagaaaataaactagttgcttgagatggaacctactcctagtgaagatgctgtgaacactggtgaaatgacaaaggactaagaatatttcataaacttggtaaagtagcagcagggtttgaaaggattgacttaaatttcaaaagaagttctgtgagtaaaatgttatcaaacagtatcacatgctacagagaaattcttcatgagaggaagagtcagtcagtgtgtcaaacttcattgtttgattttaagaaattgccacagcaactgcaggcttcagcaaccatgaccctgatagtcagcagccagtaacatcaagacaggatcttccaccagcatgggaatgtaaactagtacaaccactatgggaaaaaatatgtggaaattccttaatgaactaaaagtagaactaccatttgaaaattctaacaatcccactactggatatctacccagaggaaaagaagtcatacgaaaaggataacttgcacacacatgtttataacagcacaatttgcaattgcaaaaatgtggaaccagcccaaatgcccatcaatcaacaagtgaataaggaaactgtagtatatatatgtgtgtatatatatgatggaatactactcagccataaaaaggaatgagttgatggcattcgcagcaacctggatgggattggagactgttattccaagtgaagcaactcaggaatggaaaaccaaacacatgttctcactcataaatgggagctgagctataaggatgcaaaggcataagaatgacacaagggactttggggacttgggggcagaagggtgggaaggaggtgagggataaaagactacaaattgggttcggtgtatactactcgggtgatgggtccaccaaaatctcacaagtcaccactaaagaacttactcgtgtgaccaaataccacctgttccccaaaaacctacggaaataaaaacattttttaaaaaagatctttcgccagcaaaaagattgttaagtcactgaagactcaggtgatcattcgtatttttagcaataaaatatttttatattaaggtatgttcatttttaaaacaatgctactgcacacttaatatagtcataactttagagtacataacatttatatgcactgggaaaccaaaatatttgtgtgacactttatttcaatacttgctttagtgtggcagtctggaactgaacccacagcatctccaagatatgtttatattccctatctggctagggagatagcagttgcacattttaatgaatgctttttctgcatgtcatatgatttttatcttttgttcatgtggccattaatttactttttgagacagagtctcactccatcacccaggctagagtgcagtggcatgatctcagcttgctatagcctctgcctaccaggctcaagtgattctcgtgcctcagcctcctgagtagctggaattataggtgcacgtcacacgcccagctaatttttgtatttttattagagacaaggttttgccatgttggccaggcccatctcaaactcctgatctcaagtggtctgcccaccttagcctcccaaagtgctgggattacaggcgtgagccactgtgccggcctcatgtggtactttactagtgttaaacgaaccttgtcttccaggaacaaacccagtgtggtcactatatattttacatataatataccgagtttggtttgttactattttgttttaggacttttccatttatgttaaagacagattatctaattttattatcaagtttattttgccattataaaatgggtttgggaatagattttaagattttgaatttgattcttttttatggctctacagaaattactaatattgcctttaatttccctaaacataataagcctagttattttaaaagtgttatgttggataatcctcttatcgggatcttctttttggagttgattttatagtctgttggttatggtgatgttcagtcaagctaacagaatctcttcatatgtctagttattttcgagtgctaaacagtgtatatgaaatcttgttatttctctccaaagaagatttatgattgtgtctgtcagaaagctggagtcactagcatctcagattaccctaatgcattttcatggattgaggtggttttaaattgggtttcagacatcacaaaagttaatttgtagttggcctttactagaaaagggggaaggatggacaggtaatcaccaaaggattattagtaaaatttacagttgacttcacagcataaacaatggaagccagaagacaatggaatatttttttaattataaatttttatgtaagtaatattgcaataaaatatttagttcttaccagctctgagtttattggaaactctgttctgtttctcagcctctaaatctcctcttccagaattggtaacgccctgggaagaaacaaacccaactgccagattcagctctctaagatttcttcctttccaagattttgggcccatgattcattcaccgcatttttgtctctgcgggtctttgaagaaggtgttttatttgttcagcttttccctaatctatcattagaagttgaacaactcctgcatctctttgggggagagtaaaggggaatggagttcttgctcattcactcaggctggagtgcagtggtatgatcataattcactgcagcctcaaactcctggctcaattgatccagtctcagcctcccaagtagctggggctgcaggtacacaccaccacacctggcttcctgaatctttatacataattaacaattttatgctaaaattggtaatttgatcgcctcagacataattatgtaaaatctgtctattcaaaatctggagtacctgtgggtatctttctgtcaactatatatttgttctcgttcttgttttattgtgtacctgattgttcatggagtatttggtggaagtaatgatttcagagtcatttgagacttatgataatgttaacttcctctggaaagggtttgtgtttgcttaagatacctgggggcctagaaggccaggcctagaagctgttaaaagcactctattcagtcattcagcttcctcttctggaattggcaaatgatccagaggaaaaacttccctaaagctaatctcaccgctctgaattgatatattctctaatcttaacccattaattccttaatgctctatgtgatcttaatatcctcacgcttttttattttctgtgggaaagttggtctaaattacttggtctttttttcatgtgaagtgggtgtcatcatataactttttataaagcagtcattactgttaagttctcaagccttactaatacaaaatttatgaaaggcagcatgggaatagtaaaacaccgcaggcctggttactgaacaaacctgggtttaagtcatgactcaactgtttaccaattattaacttactgatttctgtgattctcagttgtctctcatacacacacagacacacacacatcaaatcaaatcatagaatggctgtaagactgtgggttaaaatatgtaaaatccttaacaaaaacggggctttgtacaagtacttaactgtgtgttacccactactctcttcttgtacccccacttctatacctaccccataatatttatcttgctcaaagtttgaacttctcctttttatttccctcaggtgattctagtcacaagattcctatttcaaattttgaacgtgggcataaccaagcaactgtgttacaaaacctttatagatttattcatcccaacccagggaactggccacctatctactgcaaggtaatttcaggttaagaagttcttttaaggtatcaatttatagtaccaaaagatccataaaacaaagaatttttgcctgtgtatttttgtctgtatattgtgtgtcttaaaacacactcattttgaattgttttgaatgtaattaggtatagtgcctattttaaaaatgtctccaattttggagggattttgaagactgcaaaagctaaacatatatctattttggtagagttcatgttctctgagttcttctttctgaaatatctacagtatctttttacccttaagaatggatgctccattctattccgtacacctatctttcgaaacaagaataccttttcttcaaaactgtctttgtagcaatcccttccttctttgtttgtaatatttagagagattatattcttccaggcttggagttgaaaagttgggttttaaccttgctacttagtataaccgtgaagtgattatctgatctttttctgaacattggtttcttcatttgcataccctaggtctctcttgcttctcataaagtatcttaacatttctgtataaatgtaactgactaataatagctgtagtcttttctaatatatgtcaattttttatagttttcatttcattggcacaaactcctcagtctttctcctgtgccccctacctcccaacccccacattttgaaaggacagcattagaagtcattcaaagtaggagaagatacaagtagtttttttgttttgttttttgttttttgctttctccagtctgatgatagaaccagagtcaactggtgtttgaagcatatggcaaaggcatcaggtaagtaaaactctgggttgctgcagaagtgctttatagttaatatctgtatttgtttccactttgatatcttccaggtatctaaatttactaattgtatgtgtttttccatttactaatggaagaaatcaggcaagatctacaacttctcactgtagaggaccttgtagtggggatctaccaacaaaaatttctcaaggagccctctaagacttggattcgaagcctcctagatgtggccatgtgggattattctagcaacacaaggtattgctagcatttttgttttagagtcattttgacttattttctagactgagaaaatatggtaggactatttttgcctttttatgcaatattttcccatgaaagcttggaatcattgtatttccctgaatataaaatttcattgatagtaagatatattgttacttgtgtatcactaaaaacaaacctgccaaataaactgttctttcttatcacttagaatttctatactgatgagagaatatccctaaatttatttagacagatttttattacatagaactcttgtacttacatgtaaaagaatatataagtgaaataaattggcaaaagtattttttattttgagataattttagacttacagaaaagttgcaaaaataacacaaagtttactattctctgtttccttaattgctaacattttaatacattttctttataattttgtttctaaatatatatacactttttcaaaaccacttgagggtaagttgctatcattatgcctctttatacctaaatacttcaatatgtgtttcctaagaataagaatgtttagtctacggccatagcaccctgaacacacctgatcttgtctgatctcacaagctaagcagggattggcctggttagtacttagatgagagactgcctgggaatactgggtgctgtaggcttttactgtgtgagtgcgtgcgtgtgtgtgtgtgtatagaacatttatattaccatagtgtaatgatcaaaatcaggaatgttgaatataggacacaatactattatctaatccgaagaccatattcatattgtattagttattccactgtgtcttttacagccaaaaaaattctagagtccagtccaagaccacatgttgcacttagttattatatctctttaatctggaacagttcttcagtcttattttcactttcatgatctggacatttttgagtacaggccagttactttatagaatgtttctcacttttagttgatctgtatttcctcatggttaaattgagattatgcatttttggcaggaataccacagaagggattatgtgactgactgctcagtgtgtcatatctggaggtatatgatgtcagtttgtccaattactgatgatgataactttgatcacttgtttaatatagtacctatcaatatttctctattggaaagttactggttttttactatatatatatatatatatatatatatatatatatacattttttttttttttgagacagagtcttgctgtatcacctaggctggagtgcagtagtgtaatctcagctcactgcaccctccacctcccaggttcaagtgattctcgtgcctcagcctctcgagtagttgggattacaggcacccgccaccatgcccagctaatttttgtatttttagtagagatgtggtttcaccatgttggccaggctgatcttgaactcctcacctcacgtgatccacccgcctcagcctcccaaagtgctgggattacatgcgtgagccactgctcccagctttttaccatataattaataaatattttgtggggaaatactttcaaattgggtaggtattctcttcctcaaactttcatatacaaattttagtatcaagtgctgatttttgcctgagtcaattattactatcattgtgaaaggtgatttttctaatttgattgttccttctgcatttattggttggcattccactgtaaaaaaaaaaaaagtttctcctttttacccatttatttatttttttcatttatatgagcatggactcatggattcctattcagtacattttaatctattattgtaatttatttttatgatcaaattgttccatatatggccagtgggagtaccttcaagcaggggtttgtgtgtccttttgacattgcttcattgctttctatctaacagtgcttctttgctttctatttggcacaatatgttccaggcctatcttgtactttctttgttccagccctggattagccatttctcccaagaatctctggtttcttttagtggagcataacagttaggagatagaatctgggtggtaggtgtgctcatttcttactagagtatcattgattctagatccccttagtagagagctaggaaatatatgtttgtgtgtgtgtgtgtgtgtgtgtgtgtgtgtgtgtgtgtgtatgtacacacacactccatatacatctgtttgtagctaggtctctcaatctttttatccatctctatcttatcatgagttcacacttaacctgtaatttcaatccaataccatagagttctctagtttttttactttttaaaaaatttcctttctctgagaatgagaaccctggctgtcagtattttttagaattatatggtaccactatttttaaaaaaagacatacaactgtttagagtttgtttataatcgcttttagtctgaaagtatatagtcaaaatactttgttcagaagttatttaggttcttttttcccctttcagtacaaattactcttttgaaatatattaatagttaagttcgtttgcttgtttgtattccatttttgctaatttagcttttgaatgtctaaagcatttccgttttgtaaacaaaaataatattcagaagtgtcactttattctagcttcattaaaaaaagcttgttaggattgcattaaatttataaattaacttggggataactgaaatatttatattgttgagttgtttccaaagactagggacatctttccattgttcaaatctacttttgtgtctttcaaatatgttttaaaatttttctcacacagattgtgcatctctgggactggcgcatttttgtaggagcagttccttgataactttttctgttcttctatggaaattggttttattaggctttctaattttaatggggtaaattttggtaatctgtatgtttctagaaaatgatacatgttatatagcttttcaaagttatttgtttaaagatctgcaaggaagtgtggtctcttaaaatttttttaaatttcatctgtttcaatggttatcttgtcattgtatatttgtgctctctcatttttttgtaagcaaatgtgttgtcttttttaatttttcaaaacaataggattttaatttattagacctgtttttctattctcttcctaattaatttttgctgttactctctttgtatgttgttgttctttttctagttttgggggctggaaatgtaatttatcttttgcctgatttttttgatgtgtttagtagagtgaattttctcttaatcattgttttcaatgaatttacgtagattattgcatgcaatattttcattgccattttaaataaattatgtcattttaactctcaaccaccatctctttaaaacaaggcttttaaatgtccaggtgaaaaggactttctgcattttgtttcttttagtaaattccagtgtttttacattgtgatcagaaagtgtttataatatttttactttatggaagttactggtctttggggtttttttgctgacttaatatataatcaatttttgtgactgttctcttggcatatgagaatatactttcttttcaggatatagcatttgagatccacacacatacatcatctacattaattgtattgtttacattttctttaggtatattttatccagttgatatgtcttgtgttgacagtaatctcctattattactgtgtttctgtctgtgtttcattgcatttcctgtagttgtaagctggctgctgtgatatttgatgccttaaaagttaaagtttgctgaaccttgatacagtaaattgatcaggggctcatggaagagtattccctgtgttcttgcatgtttaaaactttttctaatggtgtacaccatatttccttgagtttctagaaaatgcaacttcatttcatggctttgtgtgttccttttgtgaaatttggtcagttaattttcttggccttagttatctgatctttttgactggagttagttgatcattttgcctggagactttagtcttttttcatttttaaagtctaatactgttactaggctatttctctgagtttatatgcaggtccattttctaagacatttggtgagccctttcaatatgcagaatcaggttctatttctggagattttttttttttttagatcatagtttaatgttagttttgttccactgtctaatgtttcttcttaaaaggagtccaatatatatgtatgtttgatcttctttgcctttcattttaatcactttttctgaccctttttactttgtttattctcatgatagtttctgctttcttcagtttctcttattaactttacaaatgaatctgttcagccttgggcagttggtaatttagttcttttctgtaatgtttttgtcttttttttcccctctctttcttgagttaagtaatttcttcattttttgtttatttctgtttctagttttgaagtttctcattcagggtgtgtttttatattctcacattctttttgaggatatttaatttaacatggaatggtaattgatatactttggctctatgtccccacccaaatctcacctcgaattgtaatccctatgacccccatgtgtcaagggttggaccaggtggaggtaactggatcatggcggttcccccatgctgttctcatgagatctgatggatttaataagcatctggcatttcccctgtttgcactcattccattctgctgccttgtgaagaaggtggctgcttctcctttgcctttcccatgattataaatttcctgaggcctccccaccaatgcaaatctgtgagtcagttaaacctctttcctttataaattacccagtctcaaatattacttcacagcagtgtgagaacagactaatacagtaatgttaggtttttcccctccttcatgtttttttggggggtgggggtatgagaaattatcagctaaagtgttttgattctccttttctgttttcttttcttttcttttcttttttttaaagagagtcttgctctgtcaccccagccggaatacagtgacacaatcatagctcactgcagcctggaactcctagagtcaagcagtcctcatgcctcagtctcctgagtagctggtactacaggcatgtgccaccatgcgtacctagttatttttcatttgtcgtggagacagagtcttgctgtgttgcccaggctggtgtcgaacttctggcctcaagtgatcttcctgcctcagccttccaaattgctgggattacaggtgcaagccattatgcctggctattttgttcttataatagcttgttttcttcccataatagctttctgtagatgaagatacattgctcctttgcgtttcttggacaaggctgataatttagcgggaggtttgattgagagtcttttttccaagaaccttcctctctgtcaatgtgacaaagtacaggttctttaatgaatgttttcagggtggtgggagtgtggttgtaggttcttagaattttatttcctgcatgatcttaaatttccccctttgcttttttttttctacctaatttctaaagggcccttcccccttcctctttcacttagcatggcacttgcctatagtcagtgctctgatctactaggactgtttgaatatttacgtaaagaatgggcttcctcattgtaagaatgattttaatttaatcttaggctctccattttctttcttccttccccaagttttttctggactctactgcatataaaggttggggtaggagattgagaaattgctccattggaaattacagttttcatttttctatttatagacaactgagttttgtagtgttcttctagttatgctgtaggtgtagattttgttttccccacgtttgttgttgttgttcttgttaatctgtaaagcttatggatgatgtgttaagatatttggatttatgtaccattacctcagttacaggctgaagtatttctaaaatttcacattgagtcattcattgtccatgtttttatacattattgtcctctgtgccattaagagtgttggcgatacagcatttcttaaaaaagaactccactgttgtctctggggttttcttctaagcatatcctttctgcaagttttgatgccagttctttcttgatcttttcagaagaggtcaaaagaaagttttcagggacaaactaatatgtcctcaaataatctttaaatggtttattgactaaaatgttgaaggattgcaaatgtctggttaccatcaagattaataattaaatttgtacatggttaggcaatggcaactatttctagactgtcaaatagacattgtgcaataccttcaattgtaagatgcattctaattttggttaaaatgtcaagaaaatgtgttttataattgaagaaatacagtgttgagttcagcagagtagctatactctacaacaagactagagtagctctagtttgagacattatttgaggtccatgccgtgggattttgttaaaggtaaaactcttacatagtactgtaggcactttactaaacttctttggacaggatggatctactttttattgagcttcataacataataagattcaaatgtatgatattttacaagggagtttggattgtagtatacaatagaaactgttagaatctgttaatataagcaaatgaaacttattccaaccactgctcttaaatgcttactaaaagaccttaaagtttgtaataaatttgtgataaatgttttgtctagttctaagagaaatgggtagattttgtattggtgaaattgagtacagttaggcaaattgaatattagaatcttaagtaaacagtctgttgataacatgcattttggaggctagaatatttataatttttataggtcccctagtctcctgatgcttcttgtcataattcttcttggactaattcactgtctatgatcagctgactaaacatggcagcctttatttaatcaacaaatatttattgagcacctcctctgtgccagaagatgatccaaaggtgagcagaattaatgtggtccctgccttcaagaagctaacagttaagtaggaaagaaacatacagtacataataaagaaaatggtaattttagcttttgataagtgctaagaagaaaatcaacaagacactctgacagagaagaatgtatagaaaagtagaccactttatagaatggtcaagaagaatttgagggtgtgacattagaaccgaagtgggagaaagatgcagccatgcaaaaaatggtaagaagagcaccctggacagagatagaaaagccttgaggtaaaggcttggtgtttgctagaaattgttagacaatcagtgtgactggggagtaatgagtgaagaggagaatgcacaagatgaggttgaagcagttgggggtcataaaccattagaaaaagttttaaacgtgcaagaacacagggagagatggaaaggaataggttgatttaagataggttaaagtcagtagaccttgctgatggactggacccagggagagaaaacagaaagaaataatgaaagatgacacccaggtttctggtgtatactattggatagatgaggaggagaggagcaaggttacagtgttctgaggtcctggtgaggcatcacatctggagatagcaggcaagcaactgtcgtcctgctagagctcagtgaagcggtttgggtagtgtcagcattcttttcactatgtgctgggcactgaagatacagtacaggaagacaagtcttctgccttgatggacctcacagcacgtagatgagatcacctcggcaaacagcagaaagagaagaggactcggcacaagccctgacgagctctgacaagttaaaatgtgggcagaggcttttcaaagtctcagtacctctcagcctgtaagtgttcctatgttatacaaatcatcatagccatcatcagtgtcgatgagggttgaagacatgagaaaaactgggattctggatgtaataatttcataaatctctgtgaagtatttggtcttctttaccactctgcaaagtgctctgtctttctacacaatcttctatatcctgttagggctattagtttgcttttgttccctggattatctcattcttctggattgtgagttgtggtctccctgttttgttctttttcatgttgcaggcttttcttgaatgcctgattatccttgattgcattcatatttagaaatgaggctacaaagccgagtgttccatattgttcagtggggattgttaactgatgaggctttcctgtaaggaaagcagacaagagagatgtttagttggaggcaaaatcctaaatgctagaatatgaaaggctttgctctaaggtaccagcagccattcttgctgcctggttttccaagaacagtttactttttttcatgggggttctgggaagtagactattctttttacagaagttcagcctcatgtcttctctttctgctctgagtagagacatgttcacaagtccagagcctctccagagttctgataggcagactttcttctgctgctagcctcttgagcactgaagactgtgacttctttccagcttcatcagttaccatttattttatttgccacagatttgttaaaatgtcttctatggaggcctcttcctgcttttttcctttattgtggacatgtaccatttttattctttgcctgtcatcttcacagcgtcttgggaccaagaagagataaatttgtgcaggtgtttaattcaccatcttgaaccagaaaccccagcaatagtagtattaagagatgcagttttatactttatcactttagaatagtttttcttagtccattttaatgagcttttgatacttagcaggattggagctgctcttgtacataaggcacttgtatgggaaagtttctgtgggaaatatgggagtgacacgatcatccttggcctcagaatctcctgtccaataagactctagtgtgaagatactagtcatgtatggtaaattctggtagaattccaaaagagtttcaaaaagttatgaaaaatcatatgcagaagacatcacttaagtgttgttagggtttaaaaactgttaactaatatatggaataaatgttttatttgtttcttctgtgaagatagaatttcttagagcagagatttgggttgaaaggggggacctttccaataaaaaatggcctgaatagtgactcagagaaatgaaagcctgccaggcgcagtggctcatgcctgtaatcccagcactatgggaggccaacgtgggtggatcacctgaggtcagcagttcgagaccagcctggataacatggtgaaaccctgtctctactaaaaatacaaaaattagccaggcatgatggcacatgcttgtaatcccagctactcaagaggctgaggcacgagttatcatttgaaccctggaggtggaggttgcagtgagcagagatcgcgcctcatagctaaatatgaacacaatcaaggataatcaggcattcaagaaaagcctgcaacatgaaaaagaacaaaacagggagaccacaactcccaatccagaagaatgagataatccagggaacaaaagcaaactaatagctctaacaggatacagaagagtgtatagaaaggcagagtactttagagagtactatgcccagccagtttagagtttttttgttttcttaatttttattttttgccggtacatagtatgtttatataacttaacttttgttttaatctaaggcttcatgttacagttttgtgaactaccacatttataggctcacttttctttggaaaaacagtgggaaattcttaattttatttttaagtagtcttccattcatccatgcatgaaataactttcatccagtgcaaataatggactttttacactgtttagtgtgtttataattttaaatgaagacttttgctaagtttaggcaagctttgtattgtacaagtagagctgctctgagtcttaatagactgtgtactcattggaaagatatacacaagtttataacagctcttgtcatgaaagtgtgctattttagtgtttgtaaccttgtattgacttacacaaattatttccgtcatttcctcaccaacatcacctcctgagatctccactgaaacaccaccttctcagtgttacctttcattgacactttatctaaaatgttgttcctctccaatattttatattatctttttatttttaaataaagttctatccttagaactttcccaattttccaatttactgtgtattatgcttgcatatctttcttgatctgtctttccctctagaaagtaagttttgtgtggacaataatttctattttttcaatactgtatttctagtgcctaccacaaggcctagaaaatagtgtacattgaataaatgtttgttgaatgagtgcattttgtcactaatgtgccagaagcactcattttatttcaaggtaaaatttgactgtatggttatgtgtaggttgcgtagtatcatgaatttgtatcagagaatgtagcattaaaatctgttttttaaaaatctttgtgttaaatttgaagttttagtcttcaagtaacctcattttttaaaagatttcagatagaaatctggcatataaaaacctttaagcagtgctacttcagttaggatattaaagtccatttttttgtacaggtgcaagtggcatgaagaaaatgatattctcttctgtgctttagctgtttgcaagaagattgcgtaagttggggaaaggagtttcttcataatactgtattctgattaaattattctgtgccgttttgcttgctatagctttggcaatcggggtaactctgtttccacaatgctctttcaaaacaaagggggtcaaatcaaaactacagtgagatattatctcaccctggtttaaaatggcttatatccaaaagacaggcaataataaatgctggtaaggttgtggagaaaagggaaccctcatacactgttggtgggatgtaagttaatataaccactatggggaacagtttggacgttctccaaaaaactaaaaatagagctaccgttatgatccagcacttctactgctgggtatatccccaaagaaacgaaatacattgaagaaatatctacactcccatgtttgttgcagcattgtttacaatagccaagatttggaagcaacctaagtatccatcagcagatgaatggataaagaaaatgtggtacttatacacaatagagtactattcagccattaaaaaaatgagattcagtcatttgcaacaacatagatggaactagaggtcattatgttaagtgaaataagccaggcacaggaaaataaacatctcatgtgctcacttatttgtggaatctaaaaatcaaaacaattgaacccatggagatagagagtagaaggaatgattactagaggctaggaagggtactagaggggtgagggggaagtgaagattgttaattagtacaaaaaatggtttgaatgaataaggcctagtatttgatagcacaacagagtgactatagtcaataataatttaattgtacatttgaaaataactaaaagagaatcattggattgtttataatacaaaggatgaatacttgaatggatggatataccaccttccatgatgcgattactacacattgcatgcttgtatcaaaacatcttatgtaccccataaatatatgcacctactatgtactcataaaaaataaaaataaaggtggttttgtacatcatattacttttattttctatccatgtcacctctcctagcaatatgggtgaaccttcagaaccacttccttattggggtactctaacacataggtcttttgttctcgttttgtagtgaaagtaccgggagccccagataacctgggtgctctggtagcccagtgggtgatattagttcacaggatagattagtgtttatggttgtagtgttatttctgccgctgccctctccttgccttaaacatttgggaatcctggtaatctttatcttcattgccatgcccttaaaatgaacctaaaattttatctggcaatcaaaagattgcttagcagtaataacctgttttattatatgtattgctatttatttatatgtcttctctgaatctccaaatttattttttcccagtttataacagtacctcagatgctttctttttgttagagattttaaaatacaaatacttttagttgaattaaattagattctgatagtgagatttttatttcttttaaaggtactgcatcagtaattctctggccactctctttggaatccagctcacagaggctcatgtaccactacaagattatgaggccagcaatagtgtgacacccaaaatggttgtattggatgcagggcgttaccaggtaaggaactgacttttaagagctgctggtctctttagctgttctactcaatgtgattctggccaacagaaacaaaagatcagcctttgtttggttctttccctccccttaaacattattttgaagtacttcatggaatgtcaaacagttcctaatccagttgtgtcttgtgtaaaattcttttttctctggtatatttcctaccaatttaacaaagttttaagaaagttaaaactggtatttaatctttatgtaaaacatttccaaagatttattccaaaaattaaatatctgaatgtaagtaatataaatattctaaacatctacctcaaaaatatttaagacctgatttaggatttgattaaaagctatctaatttctctaccaccttccttccctccctgccgtttacttattagtaggcctctaaaccactaagtgcatagcagttaagagtatgggctctagggtcagaattcctgaattttattttaggttctgctacatacaagttttgtgactttatgcacaatacttgaactgtctgtactaattttttatgtattaaacaagaacaataataggggctagtatttgttaggattaaatgcagcaatatatgacagtaccaaggcctccctgccttagagcttaatagataataaatgttgttattttaaaataaacacttactgaaaaggaaactcaaaaaatggcatgaactactgatgaaaacagctagattcatcctagttaattatgctgaacaaaagaagcagtctccaaaattacgtactttagaatatactgtatgattccattcatatgacatttttttgaagactaaactataacaagaacaaattagtggttcccaggagttaggggtgggaacagggtgtctgtaaagggattgagcatgagagaggtttttgaggtgatagaatggctctgtatcctgattgtggtgtttacacaattctgtacatacattaaacttcatagatgtgtacaccaaaaaaagttttactgtatgataatttaaaaataaaaacggaaggacttcagagctctccatatgtactctgggcaagacccttctctaccctccctttaaaccttttgcccagtggttctcgactccatttgtgtcctccatgggacatctgacaaagcctggggacatttttggttgtcacatctggggagggggtgcccctggcatttagtggataaaggccaggaatgctgttaagcactctatctatacaggacagccttccacaacaaagcattttccagcctaaaatatcattagtgcccaggttgagaaaccctaccttagcttcatcaccactatctgtgttcacatcatcagaattaatctcaataatgtgccttttcattgtttatatcagttactataggaagcctaggactctcagattctctctcatctcccagactcaccttatttggctggtcctatttcccagcccttcccaactcctgagaaaccttcctgtgggttttctcagccttagttatcagcaaaatttcaggtatcttcagtttctttggggcaaagtctatttaccttcttggttctaactaaaacttgaccctcctctaaggacactgcttctctattaaccttttcaaatggtgacatcttttgcttcttcatgtgtcatagggcctagatttgaagtagttgtccttgatcgtggcctccagacttctttatatagtctccccaaaattcctaggcattgaatttcctgttatccaggatgtagtacctttttggagtcagtagactccaaatggcctctttttggagtcagtagactcctgagttggttcccctcattcttagagcaacaccaatccagaaaactggtttttccatcagaattatttatttcaatttccctacacatagtccttccagctgcctaacctctcagtttgatttcctctccttcaataatcttgtcttctacctaacaatcatatcctggaccccagtggtacctccttcataatctcaatttcaaacatccccctctcagactaccaccatcttctactacccctgtgctaacaattatttagtctctactgggatatacaattcatttatgcctccactgttttatactcccttacagggccacttcattgcacaactccaggacaccattcacactagtaatgctgtagactcatgtctcctcctttaccacctttgtctctactcttcacctccttccttcccaactcagattccttggcctatcttttccactgccttgcatgcactgtcaactccattggccctctttttttcctcatacttgacagatactaaccctgattacatgtaactcttcacctactctcctcctatgcctgtgacactaaatgcggctggaaaggaactaccacgctgaccgatcttactgactattcatcaccaccaacttcaaggggcctttattgttgcctgacatacccatttctctagtctgattaatttcctactctcctagacagttatttctcaccacctttttccttcagatttcatcatctcttccctcacctttgctctagctgattcctttgcctcctacttctctgagaaaatagaaacagttgggagagattttctacatattcctaccactcatctacgtgcatctaccatattctctgctttactcctattttaatgaatgaattttctgtgttcctatctaaaaccaatctgtctgcttgtatattagatttccttcccttaccactcaaggacatggcttcagtaattttcccctcctgtatcatcagggattccctctgttctaattcattatcagcaaacgtgctataatctcacttttaaaaaaaaaggcaaacccttttttgccctatacttcgtaatctccctccaaagtctatcctattttctccccctttgcagcaaaaattgataagacattggaaaagtatttgagtgttagtttgcatttttaaagagtaatatgaaattgaagacagaccatccagtaatgaataagaaataaacatttttccccctggtattttcctgttacttacagaagctaagggttgggagttcaggattctctcatttcaactcttctaatgaggaacaaagatcaaacacacccattggtaagcaacttatattttacaaaaatgcacctaaaggatgttagagcctattactaagatcccaggtgtggtatttaaacagtgatatctaaattagctttaggatataagaagcttgttgaattgagggttttatttggcattagcaccttaaacaatttagatgtgtacatttttgggtcacttggatacattgtaacttctcagaatttgttagggcatttaaaagaaaacctgtttttcttgtagcagcaatagctttatagttttgattttaatggtatcttttgtggggtgagaaactttaaaagctagtgacatgaaatttcaagtggtacctaaagaacttcaattaaaagtttcctgggctaaaaacaaaaacatttttctgttgaattatggcttagtgaaaggcctacagtaggatgagtcagttaattgaggcatctctttgtaataaaattataaaattgctatatctcttttcttgtattttcaatatcctaggtgactacccatctagggcaaaaatttctggccaaaacagcagcgttcggggaagaggaattacccgcttactagagagcatttccaattcttccagcaatatccacaaattctccaactgtgacacttcactctcaccttacatgtcccaaaaagatggatacaaatctttctcttccttatcttaatgatggtactcttttcaatttctgaaaacagtaacaggcccaacttccttcttactacagtcatattaaacagatcacatcaatgacaaatgtcactactataaaaactacttaatttgtaaggaaattgtttcatagatttaaaaaaattgtggttggagagcatcttggcatttgtgctttttttcttgagggattgttctgcttcctggctgtatgatgggtatatcattaaagtttggagtcctatatgaacaaaactgacatttttagagttgtacttttgggaatgttatagattgatcattctttctcctgataataaaggtattgaatatctgttatgaaaggttctaaaa

SEQ ID NO: 305 - DNA, 1908 bp, Homo Sapiens
agagcacttggcacctgcgacggcgctctccccccacctcacccgcaaggcggcacgagccggaatcttccagtctcaggctgtttgttcccccgcggggcaatgcgactgcgcgtcgcttcctgattggccgagagttgcgggctgcgtgcgcaggcgcctacctctgttacttagggcgggagcccggcgagggcgccggtgctttgttctgtctgaggccaggaagtttgaccgcgctgccatgccgaaccgtaaggccagccggaatgcttactatttcttcgtgcaggagaagatccccgaactacggcgacgaggcctgcctgtggctcgcgttgctgatgccatcccttactgctcctcagactgggcgcttctgagggaggaagaaaaggagaaatacgcagaaatggctcgagaatggagggccgctcagggaaaggaccctgggccctcagagaagcagaaacctgttttcacaccactgaggaggccaggcatgcttgtaccaaagcagaatgtttcacctccagatatgtcagctttgtctttaaaaggtgatcaagctctccttggaggcattttttattttttgaacatttttagccatggcgagctacctcctcattgtgaacagcgcttcctcccttgtgaaattggctgtgttaagtattctctccaagaaggtattatggcagatttccacagttttataaatcctggtgaaattccacgaggatttcgatttcattgtcaggctgcaagtgattctagtcacaagattcctatttcaaattttgaacgtgggcataaccaagcaactgtgttacaaaacctttatagatttattcatcccaacccagggaactggccacctatctactgcaagtctgatgatagaaccagagtcaactggtgtttgaagcatatggcaaaggcatcagaaatcaggcaagatctacaacttctcactgtagaggaccttgtagtggggatctaccaacaaaaatttctcaaggagccctctaagacttggattcgaagcctcctagatgtggccatgtgggattattctagcaacacaaggtgcaagtggcatgaagaaaatgatattctcttctgtgctttagctgtttgcaagaagattgcgtactgcatcagtaattctctggccactctctttggaatccagctcacagaggctcatgtaccactacaagattatgaggccagcaatagtgtgacacccaaaatggttgtattggatgcagggcgttaccagaagctaagggttgggagttcaggattctctcatttcaactcttctaatgaggaacaaagatcaaacacacccattggtgactacccatctagggcaaaaatttctggccaaaacagcagcgttcggggaagaggaattacccgcttactagagagcatttccaattcttccagcaatatccacaaattctccaactgtgacacttcactctcaccttacatgtcccaaaaagatggatacaaatctttctcttccttatcttaatgatggtactcttttcaatttctgaaaacagtaacaggcccaacttccttcttactacagtcatattaaacagatcacatcaatgacaaatgtcactactataaaaactacttaatttgtaaggaaattgtttcatagatttaaaaaaattgtggttggagagcatcttggcatttgtgctttttttcttgagggattgttctgcttcctggctgtatgatgggtatatcattaaagtttggagtcctatatgaacaaaactgacatttttagagttgtacttttgggaatgttatagattgatcattctttctcctgataataaaggtattgaatatctgttatgaaaggttctaaaa

SEQ ID NO: 306 - protein, 434 aa, Homo Sapiens
MPNRKASRNAYYFFVQEKIPELRRRGLPVARVADAIPYCSSDWALLREEEKEKYAEMAREWRAAQGKDPGPSEKQKPVFTPLRRPGMLVPKQNVSPPDMSALSLKGDQALLGGIFYFLNIFSHGELPPHCEQRFLPCEIGCVKYSLQEGIMADFHSFINPGEIPRGFRFHCQAASDSSHKIPISNFERGHNQATVLQNLYRFIHPNPGNWPPIYCKSDDRTRVNWCLKHMAKASEIRQDLQLLTVEDLVVGIYQQKFLKEPSKTWIRSLLDVAMWDYSSNTRCKWHEENDILFCALAVCKKIAYCISNSLATLFGIQLTEAHVPLQDYEASNSVTPKMVVLDAGRYQKLRVGSSGFSHFNSSNEEQRSNTPIGDYPSRAKISGQNSSVRGRGITRLLESISNSSSNIHKFSNCDTSLSPYMSQKDGYKSFSSLS

SEQ ID NO: 307 - DNA, 1772 bp, Homo Sapiens
ggcagcgcggcacggggcgagcgtctccccgccgcagagcccgccgcgcgggggagctcggccgccgcaccgcctcccgcgcctccgccccgccgcccgctgccgcgactgccaaagtttctcggtcacgtgctggcccccggcggcccaaaggtcagcaagatccccgaactacggcgacgaggcctgcctgtggctcgcgttgctgatgccatcccttactgctcctcagactgggcgcttctgagggaggaagaaaaggagaaatacgcagaaatggctcgagaatggagggccgctcagggaaaggaccctgggccctcagagaagcagaaacctgttttcacaccactgaggaggccaggcatgcttgtaccaaagcagaatgtttcacctccagatatgtcagctttgtctttaaaaggtgatcaagctctccttggaggcattttttattttttgaacatttttagccatggcgagctacctcctcattgtgaacagcgcttcctcccttgtgaaattggctgtgttaagtattctctccaagaaggtattatggcagatttccacagttttataaatcctggtgaaattccacgaggatttcgatttcattgtcaggctgcaagtgattctagtcacaagattcctatttcaaattttgaacgtgggcataaccaagcaactgtgttacaaaacctttatagatttattcatcccaacccagggaactggccacctatctactgcaagtctgatgatagaaccagagtcaactggtgtttgaagcatatggcaaaggcatcagaaatcaggcaagatctacaacttctcactgtagaggaccttgtagtggggatctaccaacaaaaatttctcaaggagccctctaagacttggattcgaagcctcctagatgtggccatgtgggattattctagcaacacaaggtgcaagtggcatgaagaaaatgatattctcttctgtgctttagctgtttgcaagaagattgcgtactgcatcagtaattctctggccactctctttggaatccagctcacagaggctcatgtaccactacaagattatgaggccagcaatagtgtgacacccaaaatggttgtattggatgcagggcgttaccagaagctaagggttgggagttcaggattctctcatttcaactcttctaatgaggaacaaagatcaaacacacccattggtgactacccatctagggcaaaaatttctggccaaaacagcagcgttcggggaagaggaattacccgcttactagagagcatttccaattcttccagcaatatccacaaattctccaactgtgacacttcactctcaccttacatgtcccaaaaagatggatacaaatctttctcttccttatcttaatgatggtactcttttcaatttctgaaaacagtaacaggcccaacttccttcttactacagtcatattaaacagatcacatcaatgacaaatgtcactactataaaaactacttaatttgtaaggaaattgtttcatagatttaaaaaaattgtggttggagagcatcttggcatttgtgctttttttcttgagggattgttctgcttcctggctgtatgatgggtatatcattaaagtttggagtcctatatgaacaaaactgacatttttagagttgtacttttgggaatgttatagattgatcattctttctcctgataataaaggtattgaatatctgttatgaaaggttctaaaa

SEQ ID NO: 308 - protein, 378 aa, Homo Sapiens
MAREWRAAQGKDPGPSEKQKPVFTPLRRPGMLVPKQNVSPPDMSALSLKGDQALLGGIFYFLNIFSHGELPPHCEQRFLPCEIGCVKYSLQEGIMADFHSFINPGEIPRGFRFHCQAASDSSHKIPISNFERGHNQATVLQNLYRFIHPNPGNWPPIYCKSDDRTRVNWCLKHMAKASEIRQDLQLLTVEDLVVGIYQQKFLKEPSKTWIRSLLDVAMWDYSSNTRCKWHEENDILFCALAVCKKIAYCISNSLATLFGIQLTEAHVPLQDYEASNSVTPKMVVLDAGRYQKLRVGSSGFSHFNSSNEEQRSNTPIGDYPSRAKISGQNSSVRGRGITRLLESISNSSSNIHKFSNCDTSLSPYMSQKDGYKSFSSLS

SEQ ID NO: 309 - DNA, 1875 bp, Homo Sapiens
agagcacttggcacctgcgacggcgctctccccccacctcacccgcaaggcggcacgagccggaatcttccagtctcaggctgtttgttcccccgcggggcaatgcgactgcgcgtcgcttcctgattggccgagagttgcgggctgcgtgcgcaggcgcctacctctgttacttagggcgggagcccggcgagggcgccggtgctttgttctgtctgaggccaggaagtttgaccgcgctgccatgccgaaccgtaaggccagccggaatgcttactatttcttcgtgcaggagaagatccccgaactacggcgacgaggcctgcctgtggctcgcgttgctgatgccatcccttactgctcctcagactgggcgcttctgagggaggaagaaaaggagaaatacgcagaaatggctcgagaatggagggccgctcagggaaaggaccctgggccctcagagaagcagaaacctgttttcacaccactgaggaggccaggcatgcttgtaccaaagcagaatgtttcacctccagatatgtcagctttgtctttaaaaggtgatcaagctctccttggaggcattttttattttttgaacatttttagccatggcgagctacctcctcattgtgaacagcgcttcctcccttgtgaaattggctgtgttaagtattctctccaagaaggtattatggcagatttccacagttttataaatcctggtgaaattccacgaggatttcgatttcattgtcaggctgcaagtgattctagtcacaagattcctatttcaaattttgaacgtgggcataaccaagcaactgtgttacaaaacctttatagatttattcatcccaacccagggaactggccacctatctactgcaagtctgatgatagaaccagagtcaactggtgtttgaagcatatggcaaaggcatcagaggaccttgtagtggggatctaccaacaaaaatttctcaaggagccctctaagacttggattcgaagcctcctagatgtggccatgtgggattattctagcaacacaaggtgcaagtggcatgaagaaaatgatattctcttctgtgctttagctgtttgcaagaagattgcgtactgcatcagtaattctctggccactctctttggaatccagctcacagaggctcatgtaccactacaagattatgaggccagcaatagtgtgacacccaaaatggttgtattggatgcagggcgttaccagaagctaagggttgggagttcaggattctctcatttcaactcttctaatgaggaacaaagatcaaacacacccattggtgactacccatctagggcaaaaatttctggccaaaacagcagcgttcggggaagaggaattacccgcttactagagagcatttccaattcttccagcaatatccacaaattctccaactgtgacacttcactctcaccttacatgtcccaaaaagatggatacaaatctttctcttccttatcttaatgatggtactcttttcaatttctgaaaacagtaacaggcccaacttccttcttactacagtcatattaaacagatcacatcaatgacaaatgtcactactataaaaactacttaatttgtaaggaaattgtttcatagatttaaaaaaattgtggttggagagcatcttggcatttgtgctttttttcttgagggattgttctgcttcctggctgtatgatgggtatatcattaaagtttggagtcctatatgaacaaaactgacatttttagagttgtacttttgggaatgttatagattgatcattctttctcctgataataaaggtattgaatatctgttatgaaaggttctaaaa

SEQ ID NO: 310 - protein, 423 aa, Homo Sapiens
MPNRKASRNAYYFFVQEKIPELRRRGLPVARVADAIPYCSSDWALLREEEKEKYAEMAREWRAAQGKDPGPSEKQKPVFTPLRRPGMLVPKQNVSPPDMSALSLKGDQALLGGIFYFLNIFSHGELPPHCEQRFLPCEIGCVKYSLQEGIMADFHSFINPGEIPRGFRFHCQAASDSSHKIPISNFERGHNQATVLQNLYRFIHPNPGNWPPIYCKSDDRTRVNWCLKHMAKASEDLVVGIYQQKFLKEPSKTWIRSLLDVAMWDYSSNTRCKWHEENDILFCALAVCKKIAYCISNSLATLFGIQLTEAHVPLQDYEASNSVTPKMVVLDAGRYQKLRVGSSGFSHFNSSNEEQRSNTPIGDYPSRAKISGQNSSVRGRGITRLLESISNSSSNIHKFSNCDTSLSPYMSQKDGYKSFSSLS

SEQ ID NO: 311 - DNA, 261066 bp, Mus Musculus
  misc_feature (1)...(261066): n = A,T,C or G
tgtgattgagctccgcagccctccgtgtttgctaaaatgctaaacgaggggcccgtggctctcagagcatattccatgggaaatgccgagcacaggagctgcagtcctcttccttcacgctcgggctggctgattgccagagcatcgaggccagcgattaagggactgaaatataatcggtggtgatacatttgcaccaccacatgagacctgctctgcctcggagggctccagtgggaagcagcagctggggcagctagactctgcaaggcaggaagatctcatcgcaatggtaaggctcttgggagttttctgcagacttcatttgtaacctgggggaggaggattagcgggtgctggtgaccatggctattggtagcctgagagtgaacagtcacttgagctccgagacacagtcaggtatcactaaaggggaaaggacacccttcacaccagagcctgatttatttttttcttaagtgacacctttcacgccagggttaataggtacctgtgccttgtaattaataataattaataagaagcacttgctggccttgtcaagaaaggatatttccaccggtgacctggaatttcagccttgccctaatactgtgtctgagtatacttttccctctgaaaatagctttaatttccatgtgactctttaaagaacggatgggctgtcatctctatgttttcatgggggcacggactctttgtactaagccccgctttcttttcggcctcctgagttgtcagagttctgtgagcctcacactctcctgcagacatggcacagtcctggnnnnnnnnnnnnnnnnnnnnctccagtgggaagcagcagctggggcagctagactctgcaaggcaggaagatctcatcgcaatggtaaggctcttgggagttttctgcagacttcatttgtaacctgggggaggaggattagcgggtgctggtgaccatggctattggtagcctgagagtgaacagtcacttgagctccgagacacagtcaggtatcactaaaggggaaaggacacccttcacaccagagcctgattttttttttcttaagtgacacctttcacgccagggttaataggtacctgtgccttgtaattaataataattaataagaagcacttgctggccttgtcaagaaaggatatttccaccggtgacctggaatttcagccttgccctaatactgtgtctgagtatacttttccctctgaaaatagctttaatttccatgtgactctttaaagaacggatgggctgtcatctctatgttttcatgggggcacggactctttgtactaagcccgctttcttttcggcctcctgagttgtcagagttctgtgagcctcacactctcctgcagacatggcacagtcctggagaaaacttctaagtggttttctctttcaacactgtctgcaggtgacagcaacaggagctcaagaggtcaaggaaagcttggtgggaagttagttcaattcactccagccattgccagagcgaagtgcaccttaccataaacatggggtcttagaattctcagggggacatggcaagaggctattccatggtctctgctgcctttgtagctttttcaactgatttcctagtcactgtcatcgctgacacggggtgggggtggggaagaatttatattaagtgaagactttaagtgtttcccttgaagaatgaaagggtgaaggatgttggtgaccacaagattatataacatttaaaagaaaacaaaaactctaattatacagaaggggtgcctgaaatatacttatctgactgcacagctgatgtgtgggaaatcatgctttgtgcttgaagttttgaagcacggtgattttcctttcttctttcttctgagaacattcctttggggattaccaaggaccaggctgaaccagagccagtgagggctctgctgtgcacactggccatagtcacgggcataaacacaaggccagtcttgtacagttcagacataagatgaagaagtcaggggctgagattgttgaattgtaataaagttaaacttgcagcatgaaaaaaaaaaaaatgcaggcccttaaggacagccgacttaaccttaggagttggaaggaaggtgtaatgtggatgggaacttcaagacacttgcatctagctgtcctctgggtatgctgattaattgctgttaagaagttcggaaagaattccctagttacacccagtctgaatgggcttttcttaatgacagactccaaagtgaaagtgcttacaggagcactttctaagggagtagttccacttatagactaaaaacagttgcaggtgaggcagtctttgattggaagggagaattagttcgtcatgaaggtttgtttgtttgtttgtttgttttcccaagggaaggaaacctatcaggcttctcaccatacaagcctgatgaggtctcctgcttcccagagagaaggcattgcctagaatgttctccttgaccccattagaatggggagcctgttggggcttgctgtgtgctatagcaaataaccagtccctccaggactctgtcctctgattcttctcatttttgaaatttgttttatttagaaacataaaaggcacgtggataaggaaagccaacctgtacagtggcaaacagtttaaagttatttcaaagcaaaggaaatgtgtggatacttccagacagtagtttacaaacatgtatttagtaggttttttatctttgtcttgaaatatatattttagaattattatacttgtatcaatgggtggcacactgaagtgcttttgtatggacacacattgattttatagtatgtgaatatatgagtgagtgannnnnnnnnnnnnnnnnnnntcatttgtaacctgggggaggaggattagcgggtgctggtgaccatggctattggtagcctgagagtgaacagtcacttgagctctgagacacagtcaggtatcactagaggggaaaggacacccttcacaccagagcctgatttatttttttcttaagtgacacctttcacgccagggttaataggtacctgtgccttgtaattaataataattaataagaagcacttgctggccttgtcaagaaaggatatttccaccggtgacctggaatttcagccttgccctaatactgtatcagagtatacttttccctctgaaaatagctttaatttccatgtgactctttaaagaacggatgggctgtcatctcaatgttttcatgggggcacggactctttgtactaagcccgctttcttttcggcctcctgagttgtcagagttctgtgagcctcacactctcctgcagacatgccacagtcctggagaaaacttctaagtggttgtttctttcaacactgtctgcaggtgacagcaacaggagctcaagaggtcaaggaaagctttgtgggaagttagttcaattcactccagccattgccagagcgaagtgcaccttaccataaacatggggtcttagaattctcagggggacatggcaagaggctattccatggtctctgctgcctttgtagctttttcaactgatttcctagtcattgtcatcgctgacacggggcggggggtggggaagaatttatattaagtgaagactttaagtgtttcccttgaagaatgaaagggtgaaggatgttgatgaccacaagattatataacatttaaaagaaaacaaaaactctaattatacagaaggggtgcctgaaatatacttatctgactgcacagctgatgtgtgggaaatcattattctgtttataatctggatgaatgaagagatttctgatggagtgtggggatttttagatgcctgtctgtctttccagttattctgaaaaagaggaaactaaaaagctggcttccagggatacctccctttccttgttgcctccccttcccctacgccccactcccctcccccaagctcacctaggtcactcctaagcatgcagatccaagaaataaaacagcaaggccaaggtcaaggttcccactctcttgtgatcatctgctgccatccattcttgtgaacattttagcagcttcctggacctgttgagaacaataagcctcgtccctttctccccagccaccaggatggggaaaacaaacccaaaagaaaaccagcaatgggcgttctcagcctgaacctgaaatgagactcttggtgttctgatgctttgtgcttgaagttttgaagcacggtgattttcctttcttctttcttctgagaacattcctttggggattaccaaggaccaggctgaactgttgcctctagtgagggctctagtcacgggcataaacacaaggccagtcttgtacagttcagacataagatgaagaagtcaggggccgagattgttgaattgtaataaagttaaacttgcagcatgaaaaaaaaatgcaggcccttaaggacagccgacttaacctgaggagttggaaggaaggtgtagtgtggatgggaacttcaagacacttgcatctagctgtcctctgggtatgctgattaattgctgttaaggagttcagaaagaattccctagttacacccagtctgaatgggcttttcttaatgacagactccaaagtgaaagtgcttacaggagcactttctaaggagtagttccacttatagactaaaaacagttgcaggtgaggcagtctttgattggaagggagaattagttcgtcatgaaggtttgtttgtttgtttgttttcccaagggaaggaaacctatcaggcttctcaccatacaagcctgatgaggtctcctgcttcccagagagaaggcattgcctagaatgttctccttgaccccattagaatggggagcctgttggggcttgctgtgtgctatagcaaataaccagtccctccaggactctgtcctctgattcttcttcttttttgaaatttgttttatttagaaacataaagggcacatggataaggaaagccaacctgtacagtggcaaacagtttaaagttatttcaaagcaaaggaaatgtgtggatacttccagacagtagtttacaaacatgtatttagtaggttttttatctttgtcttgaaatatatattttagaattattatacttgtatcaatgggtggcacactgaagtgcttttgtatggnnnnnnnnnnnnnnnnnnnngtctcctgcttccccagagagaaggcattgcctagaatgttctccttgaccccattagaatggggagcctgttggggcttgctgtgtgctatagcaaataaccagtccctccaggactctgtcctctgattcttctcatttttgaaatttgttttatttagaaacataaaaggcacgtggataaggaaagccaacctgtacagtggcaaacagtttaaagttatttcaaagcaaaggaaatgtgtggatacttccagacagtagtttacaaacatgtatttagtaggttttttatctttgtcttgaaatatatattttagaattattatacttgtatcaatgggtggcacactgaagtgcttttgtatggacacacattgattttatagtatgtgaatatatgagtgagtgagtgtgtgtgtgtgtgtgtgtgtgtgtgtgtgtgtgtgtgtatgtgtgtgcgcgtgtgtttatgtggatgtgtatacctgtgtatgcatgtagcaggaagccagggattggcatagattgtctctgttcctctctctctcccttttgttgttgttcttttgagacagggtttctttctgaccctagagctcacagattagttagactgactggtcagtgagtgccaagtgtccacctgcctcctctgcctcagcactgagaggttcaaatgcacatacagggcatttacattgggtttgcctgcttgcctggctatcagtttataagagaaccatcttcccataccagaaaccctactcaccacacagtcttgcaagcttattggaggagatccaggcctaggcagactcatagcagtcttaaaacaactcactgaggacatttttcctcctatgtttccaatgtcagctgtttgggtttcttgtcatttgtttggtttggatcatataatgaaatagctaaaacaaaacaaaacaaacaaaacaaacaacaaccaaccaaccaaccaaccaaccaactaaccaaacaggttaactttgtaaagaaaggatgcttattttgctcccaatctggaggttaaagagacagtgttaggatcagctcatatctgctatggacttcatggctaacaatatggtggcataaatgaatgtgagagtgaagttgccaggcaggaaggttgagagctattcttgtcggccttaacttttaaactaagctgtgtttttgagagctaagtcaagggtcctaccttgatcccttaaggctctcagagacctaaagactttcctccaggcctcacttccttatgtgctaccctgagaatccaacacacgaagcctttggggcacactgcatccaatctatctaaagtatcatccaatcgggattgctgggagacatgagaagtaaagtgaggcaggctatgctgtaaaggtacatttgtccacactggctactgatcagagctgagtgtggaaagaggcaaagatggggatggggagcaagtagcacaataatcgtgaagggagggccccttgtaattcatcatcgctggtcaggtctttgcctgagtctcttcagattattacaacaaaatatttttcattgggtcttttataagcaacacagattcatttcttagccttccagtggccacaagtccaaggtcacatctcctgtaactttagtgtctggtgacacttcatagatagttgtttggctctgagtttcttcttaaagatcgtgccaagagcattaaaaattatagcacatacgccagtgctataatgagagcaaatgtctctcttatttattttttttgcagtattttagggagggcttgctcatgaagctgaaaataaacaaatttggacttgatccatatcttcatcagatggaagtgccgcatggacagagggtgtgctgtggatactgcaccagtccattaggtcacaagacaaaagaattctctatgtgggtactggagaaaacgccgttggcctagttaatggctataactctcttgtctgatgttgggtgcaaaatcactttgatagacagaagactttgaaagacatgagtaagctggtagctagagtgaaatttctaaggagatgctgctaacatgtgtcctcatctctgactgcagctgaaatgtctttctctaaatgtgcgcagagcagtagcatgcgggcgtccaggttcctttagcttaagcttacactgccatcctctttcctttccttactgttttcttgtttgagttctcttcaatggtcagctcccaagctcctggtagtgttcactgtacatcaccttgattaagcccttaagtagtcgagtaacctccccaattcacaccctattgctatatgtaagacttccccaatttttattcattggttatgaatattctttacaaagctgcttgtaacttaactataataccagtgaagaaaaaccaatactcatttatccaacctaacacttgtaagaattgcctatttaaattgtgtgcaaatgcattaacaaataatgaattaattttttaaggcacagaaaattaaatactacacacacaaaaattgattttggtgcattcaggactgtatacatttctccctgcccgtcttcttaattcgtttggcatgttgacttacttaagcagggttcctttactaaagtgatctgttaagctaacatcagaactggaaaatgtgcataaatcataaatggacaactcacgtgtttgcaaaataagcttggagactatgctatcactggctcctggaagccatggtgcagctgctcggagtccctttatcaccctccagttcaggtctacttacgtttgagctttacgtccacttctttgttctaagaataactgaatggtctcatcgcttaaaatcccggggggggggggggcgtgctgcctgtacataggcagagtgaggagtgagcttaccacgactctgacaatggtagagctgggaggatatttgaaaattgtcttgttttctcttttaaatagatcttcttataagaatgactatatatcttctacaaagaaaaacacatacaaatattttttcatgaaagctatgttaggagtaagcccttggggtactctagaatggactgagctagataccctatatattccctggaggccaaggctggaccaccctttgtgtcccagggtaggggttctgggcccattggagaatctctaagcagtcagcaggaaggccctaccctcttgttttacatgaagctcagggctgagcttgtaaaagtactgggacctttaaatagaagagataaattatatatggcaaggactaaagtatgtcacaagttaatttctgcatatctttatgagaactcagaaataattcaatagccttttgaggactgtcatattgagatgtaatggatgctttggagttggcagggattcagttgtacaaaattgccaagttccagcatcagctgccttgggcctctgaggactttcctgttaaagcttactattactcttatctttcattgtcgttattgtttggtatgttttttgtttcttcagttagggtcttggtatggaacacaggctttcctgggacctataatccggcctcacctttcttaccatcagaattacaagtgtgaactaccaggccttgcttacttttaaatgtgccaaagtcatatatactcaaatgtcaggaaatctacatcttttacttacattaaggaaaaatgggaagcacttataactccaagtgtaaatatagcctaatatgtaataataaagcaagcaaagtttagcaagcctagtgtacacacacacacacacacacacacacacacacacacacaatttcctgaactgaaggagtggttaagagtgcttgctgtttttttcagaagattgaagttctgtaactcaagtcaagccagttgtcgcacaacctgcttatgttatagctccacctccaagaggtccagcctacactcacacacatacatgccccccccacatacatgccccccacacacaaataaatctttcataaataaataaagattttcttttgcatttttcaaagatgcccgtggtaattacagaatattgacaacatgctgaaaaaagtgagatcgctcaagaccagcagatgccagcttctggacttctttcttacacatctacacatacacctatgcagtgcacacacacacacacacacacacacacacacacacacacacacgcacgagcattgatagcggccattggtaaggtttccatttttgctaaactgtgtcctgccactttgcctcctgttgcgaccactttgaaattgtgccctcatgctgttatttactgtattcagttgtctgtctccctctcagactgtgagtttccgtgggtcgaagcatgcccctctcagaatcttgatgacacagcatggtgaatgttctgctgaatatttattcagttatttcatgttgaaatgtgaatgttatgcatattaattagccccaattttttactgcatatatttttatggctttcattgcattctagtaaacatagctctccatcatcatttgaatgcccaaagatttttttccaaattttcctcaaaaaaaaaaaaaaaaatatatatatatatataaacattgctgcatgggcatctttgaacatccaaatatcagcagctgccaagcagaccttctcgtaacaactcattccacattgagggagcaaatgacccaatttaaaagggctaaaccaagtgtggtggcccgtacctgttaagtcagtataagtgacatagaggcaaaaagaggaggagtttaaggccaccagagactgtcacaaacaaataagcaaaacttttaagtggacaggtggacagagtcacaggagcaggcagggtgaggaagagacgaacatttttgaagaagacagagttgtatatttacattgtggattgtgtttaatctgaacctagagaagggaggggctgggtagtcaagaaagtttggcatggaccagtccagcagggtttagccccagatgctttgtagcttaagtctctgactctaaagctgtactaccttgaagcacagactctcttactcagcttcgttcttcctttggttccgttggttcagttgtatagacttttgcagatgagttatggtctgcctttgattaggcatagaatacgatcagccttgtgtacttactggtcagcctctaagcactgcacattgaacctgatgatttaggaacagaactcgggtggcgtggagcctgtctaccctgggtgtgcaaaggtatcattccaacttacccactcgggacagaagagttgacgcttctcagggaagtcatgacccactagtaacctgatctgaagcttctaacgttttggaagaccagtgcttgctcactagaatgattcaaaattatacaattgcctttaaaaaggggaagaactatacgttttttaaacttctaaaagtactttagtaacttttcaacaaagcacttcacgtaactggaggttgtctaatgaattgcagattgaactatatcctgggattcgcttgccagtatcaaggtcagaagacctatgaagacctctttgaaagatttcttatttctacttgttattcaaaaagatatttaaaggattgaagtttagggggaaaaaaaataacagtgctggccccagcactcagtaactgttgggagtgtacaatgacatcaaagctctcagacttaaccctgatctatgcagaatttagggctacccaaagccacctttctttgtctcaatacttaggcaacgtaaaaattttgcttttttttttcccttcaaaaatgtatttaatatttagcacaagcatgatttgcatgagcttattttagagagctgaaatttagggaaaggttctgaaatttttggcgtttgctacacgtgggaggacacagagaacacatacattcacacctacagtaacagtgtggtgtcacctccgactgggtggtcctcaagtttgaatcctaagtgtccccccaaagaccatgtgttcaaaactgaatctttagcttagcactgttggaaggcagtggagttttaagcagtgggtgctaagtagatgtctggtaattggaatggggagtggacctaggctcctccttttcttctctccttgccatccattcaaccatagcaaggggagcctattctccttctttcttgctccctttgtaactgcttctgaagcaggtatatgtggcctgccgactgctttccagcaagcaggcacttgtcttcccatcccccagacatagaggtataccccatttcccttgctttcccagcaattgagtgtgaagaccaggtcagttgcatatggatatttccaggccagtcataagcacttcctacacaatcttggccagcaatgcctgcaagccatgttgtgaatatggctaagctatcatcagtcttcaggggacccttctaagctaaacccccttcttccacacctgctcctgacttgatttatgcatgagcaaaaagtaacatttgcatgtagctgagctctgtttttcttctttttttgttgttgttgtttttaacagcagcaaataattcttgttttatctcctaggtttagacttcatggcacatgaagaggttatattaatgtccaggggaaatgtggtctctgcctgagacttgggtctccatgggggagggaaacagaaaacatggaaagaataaacagaaactttacatctggggataagtgctacggtggagaaaattaataggggaggaaggttattaagtccctcagaagccatctggctttgtgggagatgaagatctttacgcttaagtaggagttttgtttgttatagtctgaaaggaggaaaataagtattgataaactatcatagaaacatacgacagcatcccacacttaccttttcaacctttcctcatggtttccatgaaaactcaaaaacaacaacaaaaatgtaggttgtgttactttagcaagttgaaggtggttgtttaggatgtgtggtctgggacaatgtccttgagggctcttgaagatctcaaacacaagtgcaaaggtgattactctcagtggtcccaattggcttagtattgatttttgtttcttttgatgcctttaatgatcaaagggaaaataacattgaataaaggacacgggggggagggtggattacgtaaagtttaaatgactctttgtgaaactgtaatttgagagatgtacttttattttactttcatatccttcaaaacatgggtaaaattagaactttgagtttacactgaaagtacaaatttaccctgtgccacaggttaaaatcttattcatggaagttgttgttgttgtattatgttttaatctaagatatggaagaatgttcaaaatgacctaagttaatttttaaattaatattatgagcaagtagggtgttctgatcatggagagtcttccagcagaggcttcactgtctcctctctctcatatccctgctttgtcaactcagctctgttatcactagcctctgtctggactgagtgttcaaggttcttggcatcttgtttaaagaaatgaaggatgacacacaaatagcaatgtaacaaaggagtttactcagaagcaaagtaaaagcagagagaggcaccactgccaaggaatagcaaccttcagattgtatttgctcaagagcccctgtttactgctacagatttccctctgtgggacctgaagaagttgcttgtgcaggctggggtgggagttctgttttaatatatagtattagatatactccaggcaagattggtgcactgtctctaattccaagatatgtcccaggatgtgtttgaccacaagagggaactgactagaggttaccagaaagttactaggaattgttggggtggaatgtcctccactttgtttgtaaagggtatgtgtataactcaaagcagataggagtcacgtgttagcgagctatccctgcaaaactctctgccttagttctcctggctttccctaaagattcctgctcatagcgcattcattaacacatcactacacaagactgcctctcactagaccttctgacacagcagccagatctaggtgactggattgtctgcaccccatcctcagaaacctcagcactgtaatgctcacccgatctcttctttgtgtagaagatttggtcacctgtgtctgggagcatagctcatcctggtcaaacttgggcttaccatgggtcatgtgaggacctgataagataacgtctctttcacagggagaccacatttacacataccttcttctcatctatacagtcttgctttccaggcctagtcttacaaatgcccaaacaaccaatcagccatatatgacatcacccttccccaagtacatattggctgaatctactcagtgcatccagaggagatttggggacctttgacaagttccttgttagttttagacataacatccaaacatctctagtcaaaacactcaaaaatgcttgcaactcttatcctcattgaagtataaagacctggaaggaagagaaagaagtataactttcaaatgaaggaatgagaacagaacttcatgatatcactgtttgtgagttgcagaatgtaagtgcttttctgttgctaaaacactgactgtggtaacttacagaagtaagagtttatttgaactcattgttccagaggaccagagttcttcactgcagagaggcatggcagcaggccagcatggtggctggagaggagagctgtgtactcacatccccaacagcaagaattaagaagacaaagcaagatggaagtagagaaggttgctgactgtccgtgttgacttcccagggacaaacgttctccaacaaggggtgtacttctaaacctctccattcagcaccacaaaccaaggacccagtgttcaaatatctaagcctagagggtgcagtctcattgacaacatcacactgagtcaagcagcacaaaggtgggagtgtgagagtggggagaccggatttggatctcagtcctgccagtcactgaatgtgtggctgtatgcaaagtacttctctgtgtctcagtttcttcaaactcatcacttcctcaaaggatgaaatgagaataagtaaatacttacgaagtgcagagggtatttataaagctgccatgtagtatttacgtcagctccgttaagtctcagaggacagaggtaggaggggaaatgaagaggagggatgagtcacaggggtcacttttcctagttgcttcctctgtaagcagggttgctgttaccttaaaatgtcacctactccaaacaccacttactggaaagaacacacatttgtctccagtgtcttttgccacctatgaggacttgggaaagactcccccacaaacaaggactccctaagtcaccactgctctcaggcctgaggcctggccaccaaaaaaaaaactctgattccttgtattctataatattaataataataataaaacaaaaaaaaaacaaaaaaaacaaaaacaaatatttgatctttgtccctgttccctgggacaactacccaaggcctttgaatttcctgaatggtagaaatacattatccacgaaaccctttcccctagaccccagttatagtaattgcaacagatgactccaagccacccatatacaatttaagacatgaccaaaaagaaacaacattaatttacaatcagaacctgtcactcttggtctttatatactccttccagtacctctgagaaagtgaaagagactagaaattgaattgacttgccaatggcaatcccattaatcatttatgtgatcacagtagacttccattgatactctgagacagcaaagctagggagataacttccaggtggggcacatattgatgtgctataaggccctgatatgcctgaacaaggcattggagtaagcaccttcccttacactttgccatacagatcttttccatttggctattccaaactggctttgtaagtgaagtgctttcctgtgctccatgaattgtcttatagaacgactgaacctaggaaagggacgttgtaggcatcactgttgaatagtctcctggacagaggtacagacatataaggtcctcattccaggcaggtgtgaggaagtggggcatgctgtcttatcatgtaggatttatgctaactctggatagttaatctcagaattgcaggactctatccttaacttttttctaggtgtgtgtgtgcatgtgcatgtgcgtgtgcgtgtgcgtgtgcgtgtgcgtgtgcgtgtgcgtgtgtgtgtgtgtgtgtgtgtgtgtgtgtgtgtgtgtgtgtgtactaagtagtaatatccagattgaattgtaggaaatagatcaacagcagcactggccaggctacactggagctattggaaaatgacatgtttttgcttgatctccagatgtgagctgtgacattatatggtaggctctataaagaggcataacttaaacactcacatataaccccatatattctgcttccttcttttgctctcataaaatactctgactaaaagtaactttcaaaagaaaagactttatttcctattataatttcaggatacagtctatcactgtaggggaatcctgaggctggaatgttatacatctagtagcatcacactcacagttaagaacatatgagaatgaatgcatattttctcatttgtttggtttcttgagctcagcttgatttcctcactcatatactgtagaaaacctcctgcctagggagtggtgctacccagtctgaactgggtctttcaacatcaattaacttaattaagaccattcctcatagacatacaaacaggcaaacccaaatgtagacaaaccctttgtcctatttagagttctactgctgtaaagaggcaccatgaccaagatagtttttattagaaaaacatttaattaggggcttatttacagttttagaggattagtccactatcaccatggcaaggaaattagcagcaggcagagggcatggagctggagtggtaactgagagctttacatcccaatcaacaaacagaagtagagagacactaggcttgttatgggctttgaaactccagtagcacatctcctccacagacacagctagtccatatgtaatccttccaagtggttctccaactgggaaccagacatgcacattcgtgagcctatgggagttattctcatgtaaaccaccacattcactccttggctccttggctctcatcggcttttagccgagtcataatacaaaaatgcacttaatccaacttcaaaacttcccatagtctctcagttgggccttcttttcagttctcattcaaaccactaaactggcattgagactctcttcccaggtgatctgaaactgtgtcatgtaagcaaagctaaccattatcccatattcaccctaggaatttagtattgatcgcttatgcaatttgtgttgtcactattctgtgtccaaactttataagcataggctgtgtgtacatgccaaccacctactttgttttattttattttattttattttattttattttattttattttattttattttattttattttattttaaacaaggtctctcaatgacctggagaataccaagtaagccaggctttcaaagctgcaaagagtttgctgatccttcataacatacttagattccagaagcccaagcgattcacctgcagcttcagatagcctcctactagagtgctccaattcccaggatccctcgattgtacattggtcactgtttttgctaaccacataatggtttagctttataactcaaagaatttctcttaattctcttaatttccagactcatttcttgaaaaatatatttgttttcagattcaaagtcttatgttgcccaggctggccttgtactggctaggtagctaaggatgaccttgaacccttgatctttctgtctccacctgccaaatgctccatcacaggcgtataacaccacatccagctcattgggatagttattatatgtgttaaatacttgacagcacaatggtagacagggaacaatgcaattgaagcaatgtccaaactatgggatttatttctttctacaaaagttgaagaataagacaattacaagacacaatgtcagttaggaccgaaaacaaatgatacctgatcttttacttgggtctccgagcccccaaagtgagcctgttctaaaaacaagtcaataacccatcaaagttccttataattagctagcttgcatttataggatgacagtctttattttatttcattttttttttgaggaggattaaaagcttttactgtctgtgtgccttagctattgtatttaaaaattaacatggtttcatttaaaggtacatttaatttttaaaaagtgaatccttaagtaggaagagcaagagaataattacatattaaaatagttgctaatggggagcttcccagttaaatattcatgattagttgtgggctctgaaagtagcaaacatggaaatggccatagtcaatggatctttcaacggggaaggaattaaagaataaaaaaaataagccctgagaaagaatgtttaaagtagataagacaattttatgtaggagattggaaagcatagagtggttgaatatatttgagtatagacctagtgagtaaatcttgatgttcccataaactgtgtagaggctttaggcttgactatctccttacgggtctcctggtttctcctcatcactgtagttggaatgtccattctgaagtccatctgttatgttcctcctgtgctctcaatgtgcccgtgactgcccatatcactcagaatgagcagtctctggttaccattatctccataatccagctgtcatcccttactccctgacctcacttcctgtctctctctcctgttaatctgtgctggccatggtgaccttgtgcccctcctcagtaactgtaatatccctgggacttttacagatattctgccttctctctagaaagatgtccttccaatgtctgcacgatccactgttgaggtcattattgatgtgtctataggtagggtgagcctcttcactcccaaaccatcctgtttctatggatacaactacaaacaatcatatcaagggaaattttcagaaattaacagtgttgcgttttgtttcatttgtgtttcttagattttacagagatatgtaaggttgtttatgaatatgtgacacaagagcaaaagtgataccatgtaaagggacaagggaaccaatggagtaacttaagggggggagcatgttcaatacacagtataggtacannnnnnnnnnnnnnnnnnnnctgtcatcccttactccctgacctcacttcctgtctctctctcctgttaatctgtgctggccatggtgaccttgtgcccctcctcagtaactgtaatatccctgggacttttacagatattctgccttctctctagaaagatgtccttccaatgtctgcacgatccactgttgaggtcattattgatgtgtctataggtagggtgagcctcttcactcccaaaccatcctgtttctatggatacaactacaaacaatcatatcaagggaaattttcagaaattaacagtgttgcgttttgtttcatttgtgtttcttagattttacagagatatgtaaggttgtttatgaatatgtgacacaagagcaaaagtgataccctgtaaagggacaaggaaccaatggagtgacttaagggggggagcatgttcaatacacagtataggtacatgaaaaaataaataaagagtctccgagacatgtaagtggtaatagagatagagtttatactttgcctaaaaatgtcattgttgtgttaaactgtatttacattttattcgatgaacatttaggggtgtttcagatacatattatatcatccaatgctttgaaaaatcaaaacatgacagctttttccatactttgctttagtttgttaaatattccccagcataatctgatacagtgtcaattttctggacactggtttgttctatgacattctcaactaaatagaagatccttcaaagcaaagagatggttcctggagtaccaagtcctcagattatgaataggggcacagtcagttgaatgaatgaataaatgaatgatagaatagtaccttcaaaatagtaactgagaaaaactagggtgcagagaagttgtttagacctcactgttttcatatgaaggggactaagcttgtgtctgctctatcttagcattaaaatgatttccaggggcacatgttagtctagaaaggactgctgaaagggagaactgtcttgcagaagaatgtagccacattcactaaacactgcacaccttttagagccacatgatacaccctccctggagtacaccaaggggacaggttaagctcagttttaccctaaagcactctattagcaggagccatggtgtgagttacttcagaaaagcagtatgtgtcgccccttcctgaagatttcctgagcatttcgtggcttcatgtattttcaaggtgtgtgtgtgtgtgtgtgtgtgtgtgtgtgtgtatacttttgcttatgtgtggattttattctttttattataagaaaaataataaaatgattgacatttctgggtcattctgtgccctgccatctgccactgaaggtttgagaccgggaaaagatgggcagtgagtcaagttggcagtgtcttgaatgctatttccatctgtaaactggaagtgcagtctcatcgtacagtgccaccttgtacggttaaaatcttccttnnnnnnnnnnnnnnnnnnnnattgatgtgtctataggtagggtgagcctcttcactcccaaaccatactgtttctatggatacaactacaaacgatcatatcaagggaaattttcagaaattatcagtgttgtgttttgtttcatttgtgtttcttagattttacagagatatgtaaggttgtttatgaatatgtgacacaagagcaaaagtgataccatgtaaagggacaaggaaccaatggagtaacttaaggggggagcatgttcaatacacagtataggtacatgaaaaaataaataaagagtctccaagacatgtaagtggtaatagagatagagtttatactttgcctaaaaatgtcattgttgtgttaaactgtatttacattttattcaatgaacatttaggggtgtttcagattcatattatatcatccaatgctttgaaaaatcaaaacatgacagcttttttccatactttgctttagtttgttaaatattccccagaataatctgatacagtgtcaattttctggacactggtttgttctatgacattctcaactaaatggaagatccttcaaagcagagagatggttcctggagtaccaagtcctcagattatgaataggggcacagtcagttgcatgaatgaataaatgaatgatagaatagtaccttcaaaatagtaactgagaaaaactagggtgcagagaagttgtttagacctcactgttttcatatgaagcttgtgtctgctctatcttagcatttaaatgatttccaggggcacatgttagtctagaaaggactgctgaaagggagaactgtcttgcagaggaatgtagccacattcactaaacactgcacaccttttagagtcacatgatacaccctccctggagtacaccaaggggacaggttaagctcagttttaccctaaagcactctattagcaggagccatggtgtgagttacttcagaaaagcagtatgtgtcgccccttcctgaagatttcctgagcatttcgtggcttcatgtattttcaaggtgtgtgtgtgtgtgtgtgtgtgtgtgtgtgtgtgtgtgtgtgtgtacttttgcttatgtgtggattttattctttttattataagaaaaataataaaatgattgacatttctgggtcattctgtgccctgccatctgccactgaaggtttgagaccgggaaaagatgggcagtgagtcaagttggcagtgtcttgaatgctatttccatctgtaaactggaagtgcagtctcatcgtacagtgccaccttgtacggttaaaatcttccttctgtctcttggacagtgccaccttgtacggttaaaatcttccttctgtctcttggacttttcttgcttcctgtggcttttcccctatggccttccatttgggttactggcactgcaaatacacttgggcacagtgaacaaggaagatctggagacagtctttgtcagccctgttccatcctcttgctgggcttcactcctatgacctcaaacactcagcagccagccaggctatctgcctaggtatctttccaagcttaccttggaataaagtgcatggtattcacttttttgcagctatgcctcagcctgaatgtctgcaaataaaaatcccaaaagccatcaggagggccaaactatgtggcctaacaggtaaaggagctggctgccagcttagtgagctaagttcccttccctagatccacatggtagaagaggagaattggttacagaaacttgtcctctgtcctccatacatgtgctgtagcatgcacatatctgcctataaatatgtttaaaaagcagatgaagccatcaggagcttccgtttctataaatggcaggtttctaaagccacgctccctttatgagcacagagcaaagaggtgagcgaacccctatctcagtctgtcctggctttgtttgcaaggagccattttttctcctttgatccacttccttccagtatccactctaatgttggaatttccataaatacttttctattccatttcctcttgtcccacccaatgatctctgagagctttgagcttttgtgcttacgtggtaagttaaaagcctagaacaaagcaaaaataatacaatgcaaagtatcaccatagtaacacccccaaaaaatcatcgcacaaagcataaaacagtaccccagttgtggtggtgcacacctgtcattccaccacctgagaagtggagagaggagcatcgtgagttcaaagccagctttgactgcatgacaaataataaataaataaataaataaataaataaatagacttgggatgttatttggataatagcgtgctttaataacatgcacagggctccgagtttcatccccagtacctcacaagctgtgtactgttgtacacatccatactcccatcacttaggaggtcgaacaggtaataaaggttattctcagtgacatagcgagtttgaggctagcctgggatacatgaaaccatttaaatcgtgactggttcctaactacagcttgtagttccatcagtctcctctgcctccctcctccatgttgctggtaactttggattgtttccctttagctcctggatgagcacacagatggtttttggatacacttgtgggatgccctgatgctcactgactcacctcaggggttgggaagaagatcttaagtgacccaaacaaccacagatgcacttgatctgttaacacaaccctgactccatgatctgatttttatcagctagagaaaaacaacaacacagactacttaagacattttctttttatgccattggaaccaaagttcactcagagaacgaaagagtacctcggaaataatcgaaggcttgtctattcagatctcggatgctaatttctatggctctggtgaaaaaaaaatcccatctattgtgaggcaggtgacggacaatgttgacaattgctatgaattctttttgtgtttgtttctacttcaaagagtacatcatacacaagccataaaggagaagcagtgggcctgtggtgcggaagactagtgccattcaatcccactccacacactgagacctagagagttcaagttagaaggagcctggtggaaagattctattaccacaggaaactgacttagcttataccttaaatctctgctaagccttactcaatagcatttcttttctcttttaaaagagatcctgttatgaaacatactgcgtcaggggcaggggagtacctggaggtccccatgccaagttgcctcctgagaaatcttgtcatgcaacagacctggtgtaaaaggggagttatttgagggggaaaggagagtaaggcctggaaaagggtcagaagcagacaggcaggagcagagccatgagggcagagaacaggggacaaagaaggacagaaagggggagagagagaccagcaagaactcttggaaataaaaagggagaagcatcccgagtgctgagcatccctcacctggctgtagctgtagatcaagccctaggttcttggaaggagcccagttgaatcacctgcaagctaacagaaccctctatgcatatcctatgcaggcatctgagttcctccaagagaatggattgatccagacttggatttttttaattgatcaatctttttatgtgagaatttcatgtgtaagtatagtgtattctgatagctagccctccgttaagcattcttatcttcctcctacctgtctctttcccagaatcacgactttggctttgtttcctgacccaatcagttaaacgggtgtcatctgtgtgactactggtttgcaaccattttttggagcctgatggagtcatgactttatacagcaatatttaggaagtaattttaataaacactttctaatagatgagttaatttggagctctgtagctcaaacctaagacctcaagcatgctaaggaaatgtcctaccactgggctgtaccccagtcagtcgtttcttggtttgtttttctgtatatcctctgctggttggagtggggtttctttctattctttgaaacatttcctggattcctctatagagatcgcatgcattcctctggcatttattataagctaactgaagggtttaagttagtatcaaaaactgttcttccgtgatttagttatctgagtattgctgttctataggaatgtaatagaatgttccagctgcacacgatgacgcatatctttaagcccagcacttggaaggcagagacaagtgagtctgtgagcttgaggccagcctggtctacaaagcgagtttcaggacagccagaactaaatagtaagaccttgtctcaaaaaacaaaataaaatagttccacccagatttttgtaaatatcagtgattcatgatagaagactctggacttttttcccatagtcagattaccagtaaagaatgattttgtttcctcctaactctcatatttttcctcactttaatacaatcagcaatattagtataaagctggatagaagtcatgattgtgcatactcctctataatttctaaatatggatgaacactatcaacatttatcactctttaaattttgagaagtaaatttaatgattaaaaacaaagaatatcgcctgtaatcccactagccaaagataaatcactattttattatttttcaatatttataatttaacatttttaactgtattccattgtgtaacctaattttttatatacaaacgcatgtaattgtaaactaggatccacacatgagagaaactgtgacgtttgtacttagttcacacagtttatgtttaatggagggtgatggttttatgagatgaaaagggctcatagatggcagtgacagttacacaacactgtaggcatatttaatgacattgagtgacatttgtcagatgataatgattgggaaatatatgttgcatgtattttaccacatttcttgaaaagtgttggagacatgtgtaatgacttgggacttagacacaaagctgtggttggcttccaggagcacagactagacagggaaaatggcaggcttgggatcagtttctgtatcccagtgcaaaatgaaatgaatgtcgggcatccatttcagagccctgccccctcctccacatacacacatacataaggatttatgggaaatgcactgtcagaactcatcttgacttggtgattgttgagagcaagtgttagggacgcagcatgaaactcctaagctgagcgagcaggttaagcctttgttgggactacctccatcatctgggtgtcaggctgcaggcatagaaagtgtctcttcatcaggaacaacttacctggatatagaaggaagcagaatgcctatgcagacaaagaaggcagccactaggagcaagagtggggtgggataagggcactggatgatccatggtcatttctaggtgctatggacttgaatgttggtgtccccaaattcttatactaggattcttaggggacaggactgttaaggagtgataaggttcagataatgtcatcagggtaggtcccatgattagaggaaaagagacatatgaggacacaaagagaaggtagtcttttgtaagccaataagaaggccttacttagggacctgaattgacagccaccttgctattgaacgtctggttccagaactattagaattccatttcccgagggctggagagatggtgcagtggttgagagtatgttttgatcttgcagaggacctaggtttggttctcaatatccacatgttagctcccaactttccataacaccagctccaagggatccaatgccctcttctgacttttgtggacaccagacatgtatgtacatgatgcatagacgtacatgtaggcaaaaacactgtcacacataaaatagacacatgtaaaagttaaacgtaatgtttaatttttttaaaagtccatttattgttgcctaggcaaccttccctaagatgatggcttcctctttaccacaatgcactgtgttcagacctaaacaatggggttgagtgacttgtgacataaacctctgaaggcaaacctttccctatattaagttgattctctctagtcttttgtcacagtgacacaatcataatggtgtcttccccttcttcttcctctactgctgccacttcaaatcatgtcctttggctatagtgatccaagcagaaaatgacatctaggatgtcatatgctgagcctgaagtccctgcaagagtctgaaagctatatgcaacatcagtaaaatttttggatttaagagacatgcagattccaaagtggcaagagccactgaactgatatttaagcatcacggtccaaggcttagctagtgttttttctgtattggagctagacactaaaaaatattgactcgtgtatctttggttggggtagtaggaagtcagtggtgggaagaataaattgtctagaaaaactgttcataaatgaattccaaatttgccttaggaaggaaaattacattcatattataaatattttcacttgaagattattgcatagctaaatgttatttgaaggaagaatgggggttggctagtttaatctgcttatttgcatttggccttttactttatggtcaaatagtcgtgctgacttcaccatgcagaagtggtgattaatcttgattagaagaaggaaacaatgatttaggtgctgttgggaatgtactcgcagtaaagaataaaaaatggtaatcaggcaagcagctaaagtatttcacgcagttttcctgcatggttgctgctctctggatccatattgataaacccaggaggaactgtgccattgtggctcacagctcctgctgttaaacatagattgttgatttgcttttctgtggcttaaattatttctggaacattttctttctcaccccagagttaaatgcaaaagttttctgccaagccgaagtcaaatggtttctggcagactttaaagttggattagcatccaaggaaattccatttggtgtggagggttatttgatcagatgtccctttcatttcaataggacaggtgacatcttgtttctcacaagatgaaggttttattgctgccgtttgattttggtccttcatctttgaactggagttcattgttcaagatccatggtgtcatcaggactgaatggactgtgaaatagcctggcaggatcacatccatctttagtgcaggcttctgtctgagacaggcttaaaatctctgttttggaatcagttgaggaagaggatggaccctgattctgattggttgaatgattgacctttcttttgtctcatgtgtgcctgtgactattatcagcatggctgtagtttaatctttactgttctccaaagcccacatgaatatttgatctccagtctgttaggcctaccaaaataaatagataaataaatggcagggatccataagagatgtgtcctactgggaggaagatatctcattgtcctagtatgaggcagataggtcactggaacatatcccaaaaaggatatcaggagtgtggccccttctcgctcttctctgttaatctagtttccctaaggtagagacctcctctctaccatgatgtactgtgcttagattcaaagcaatggggccacatgaccacggacagaaacctctgagagcaaacctttccccgtgttaagtttttctctctggtgttttgtcatagtagcacaatcaccatgacctctcgccatttcccctgtcctttcactgctaccactttcaatcacgaaatcagtacaatgtacactttattctacgagggcatgtgtgtcagtataagactatagtggcaggttatgaagatctaagaaaacacagtctggggaactttgtgtcatgggagtagctgatcaggtcaactatgctgttgaatacatagcctgcagctgatagccgagccagctgaaactgtgtcacacccctgaatttgagagacattttgcagagatagcagacttgcttcgaaaccgggctaaggtgcttctagttcagaatggaagcttccatcccaacttctgactactcagtagaaactctacctacaagctaagttttgtttgagagaaaatattggaagagcagttggattattttttttctaaccataaaataaatacttcctccatccagagccaaactgtgagagtttgcgattggtttataagctgagacatttgaaggcaagctagcaagcgatcttggctttcgcttgtgtctacagcagatctcagccatcaccattttcacttactttaaaagctcactttatccgagaatgtagaatagctgttccttggaggcttggatggccccttccctaagcaccttcccctaagcatctgttaaaatgtcctatgtctgcttcaagtggagacaagaggacacaagaagtatcacagaattgtttgtggaagttactaaccaactcctagagtgaagtggttcccatattagttcagaagaaatttatttgggattcagaacagttttgatctgattacattcttttctttctttctttatttatttatttattttttgctttcccgtcttttcaacttgtcatttagaatttttattaattatttatggactttacatcttgatatgagccccgctcttctcccagtaccccccacacacagatcttcctccctccccttctcttctgaggagaaccccctagatagcaagccctgcaaccattcaccaagtcactgcagctttgtgactggccacccaatagggagtcaaggtccacagtataaaaaggtgtgatttgcaggctggagagtagctcgccactcaagaagacttaagttccatccccagaacacataagaaaagtcagatgtgataataggcacttgtcataccatcccttgatagacatgtgctcacactgtagaagagagagagggagatggggagggggagggggagggagagggagaggaacaaaacgagacagaaatttggatgtcatggtatttcctcctcatcaaaatataaagaaaggaacttagttgggggactttatttggcaacagcagcagttcagtcgtcagtgacagttaatgtagatgctatcatctgcagtgagacttttgatcctccggatgaacaacttaatactcagtggataataattgtagctcacaatcatgtggtcattaggatatgtttcagccattcccaaatagcagtgatttagaagattttgtctgttttttgattgtttgtttttttgtctccactgaagttcaacccatgtggccctttgtctttgagtgatgcattcatctttttttaatcaccttcatcttgtggctcataggtgccaaagttcattaactgaagccatggaaccacaaaagaacaattcctattggctaggatgggagagctagaactgtgctacttttgctcacatcccattggctgaaactcaggcacatggccacgcccacctaccaagaaagctggaggtgcagcttagctgaattatcaaaacaaaaacaaaaacaaacaaacaaacaaacaaacaacaaactaaccaaaaacttctcttttcctaataatctaatagcagatttatataatctttgttgttcctgctgcagcttgtattgcctttcccaagttttaaatagaaggtcctgtcacatttatgcttaatttaaaatagagaaatatttagggaagtttttagctgtgtaggcaggaagcaagggaggaaggaaaggagagagaggtgtggggggggggggtagagagagagaaagaaaaaaagggagagagggagccggtgagagggggtaaggaggggggagggaaagacacatccacacatccacagagggagagggagggagagtgattgggagggagagggagagaatatgtcatgagtgagttgctgcacaaataccctgacaatgtgcttgcatagcttttaaaacgcagttagcaattgttgtcacttagtaaagcagtagcttcgtgtctgagagaagggacccacttcaaggacagttcccagatatgggaagccatttagaataaagcttaggaacatgacaagagggagggatgaactctgtggtagccagagggaggaaatgttctggaaacaatgggaagttacatctgtaactgagagaagacccaggttgggccattgcctgtcagccaggtcttcaaagtcatgggatcagctgaacttatgcagaaaagtgccaaagaagagaacaggagcagggtggggagtggggagggtgaggtgtgcggattagggacctcaagcaagctattggctaagaaccctggcttggtatttaggagatattggagagattatcattatggcagggaaggcagaagttggattgaagtgggttaaaaataaagtggaaaataagtttaaaaaactggaaataggaaagattagtctctggataatgatagatagatagatagatagatagatagatagatagatagatagataatctatagatagacataacatataaattttattcatttatgtattttgtacatacatgatgtgaatatgtaccacagcatctgagtggaagtaaaaagacaacttttaggattcagttctcttctttgacccctgggtcctgggcgtcaaatccaactgcactgggatcagtgcctttatctgctaagccatttgggcagaaaacagtatctataaagaaggggacatacacatgaatctcactctcaccatgacccccaagcaaatgcagagcagaggaaagtgaccctggacagcagtgctactgtcaccgtgatgacatggggtttttgcctgtcatatgtggagttgaacgtcccaaagagttttctgacacatgtctcactcaaaggggagcgcttgagcttcacctgcagagtgaggatttatcagatgatgatggaggtgagaggggaagcatttcacttctgtgatgaatgacctccctcctgccaccactccacccatagtcaccaaattctccagtgctgtgtataatgtcccaccagacggccaggtagcgcagcaaggcagagagcatgttactcatggagtctagccttccaaaaagtggtggacagggcagtgtgtgggagcaaactttctcataggagcatttgcacaccatgtgccattgatgtgagctgtcaggcacaaagctaaatggttcatgccccttttataaatgaagagggtacaggccacacaggctaagagtctccagggtcaccagtaagtctgaatataaaggtaactcagaatacatttcatgtagctatttggccaaagtattctatcctcccagaaatgagactttgattactctgccatgtgtcactgtgatctcacatctcccatctcacctttgagttctgctgagatgtcatcctatttctcactttctgatgcatttgcaattatcatttgccattcccaagtttatatacatatacacatacatatctgtgtatgtggacacatatacacataaacacaatgcacatacatatacatatatatgtatatatatatacatacagatatatatatatacacatatatatttatatatatttatacatacagatacacacacgcacacacatatatatttatacatgcagatatatgtgcaagctgaaatcccagcaacttccaagaaatgtacctaataataacttactatacttattctcttattacaaaaatgtttttcaattgtccttcatgttgaagtacaactttttccctcctagcagaggatgataatctagaagtgggcatggtctggaaacatttgaggtaaatggacataccttgctaagcacttggcagtttgctctccagcagatgttgcccttctcagtgcctcctcttctgcccttccccttcacagtaaatatgtagagaacactgtgtatatatttagtacttttcatttatctgggacatagtgctttgcataaaactaagcatctctagcaaaaaggaagcagactgtctcataaaaatacttaggaagcagactggagaatgaggaccttctagagccagatggaattagaatcaggtctaggggttgaatcgcaattcctttttgtatgccgtgttttcttcggttgaattgtattatgcttctgcaagcaagataggggatgttgtgctcgagtgaaccgagacaactacaagaaacatgctgccaaacacctgtattaatcccaaagacacaatgtgaggaggaacaccacagacccaaattatcatggccacgttaattgacagaagcaattgatcaaaggtagtgtttttatttgtgtacaagggctgcctccctctaaaggtgggattcaagagatcaacttggcatgtgaggaaggcaaagtttttatagctcatgggcagtaggtttctaaatggggtactttgagggaaaaattaggcaaggttacagaatcagaacataataaggtagtcatagcaaggtgatcataacaaggtagtcatagcaaggtgatcataatgaacttttgaaacaggtaggatttcaaggtggttattttttaaaataaagacatggttgccattttctggaacaggtggtgcagaactatttgcagtcaaagttacaggtgagacatagcttaatccttgagaaacagagttttaaccataaactgaaatgaacctactttgtctttattagaagatggctttccagcccaagatggagacaggctggctcatcacatgctgcacaaaacatttgccctacagaagaactctttgtttcatcaggttttttcctcttttctttaaaactgggccctttaatactttcaacatgcatttgaatttactgaaagcacagcaaggacaaaattgtctatgtgggaaacttgcaggcaacactccatctatagcaactaggacttggatctctgagaaacttctagatgttcttaactgatacaattacatgactcttcacgtcctgcttccctgtcctttaacttcaagatcctatgatcaagcttggctatgatctgtttggcaaatagaaactacgtcatagcccatgggaggaattatgtccatggaagcagtttcttcagccttgtttccagagcccagcctgctacctggaatataatttacttatttgacaagttgttaggaaatgtgtaggcattggtgaaatgatgaaaacaatctttattttcatacagctaaaactaaataatgtaagtatccctattaatacgaaatactaaaaccacgaggaagaagatacaggattgattgttatcttttaggtctcactatgttgtctaggctagcctggaaatttgatctactggagtcctaggattataagcatgcctgccacgcccagctgacagccctttaaaatattacaatgttgtgaatgtttatatttctgattcaacaaactcctcatagcctaaggtacataccatggcatccattttagctggaaagttcaggaagttttgactggcaagtataaattgaaatgagattggggtgtttaaatagaagagttggagcccctgccatgcatctattgagtcttcctcatcctggaatcattgtatccatgtaggagaataaattaaaaaaggcatggaattttccattgaattacatcagaagtgggtgcaaaagcaaacctttgaggagcattactaagattatttgtagcattaataattccatttctatattatgaaatctgtcacttatatatcagatatatacacaagatttatatacacaatataatttgtgtttaaatatttcatatttacagagttaagtaatagcccaggagtaagaagccagtcgtaaaacatctcagttacactgtagcctagatatagagtttgaggttataaaacagaagtgccacctcatccaggaccctctcccagaagtagaggaagcctgacatgtgactggggctctggagactgaaagcttggtttggtcctgtgtctgatggtttggtggttgtgagagcttgggaagatctttcttaatctccattttctcatgcatgtcatggatccagttcacgaaggctttgtgagtcttaatgagatcgtacgcttaaactgttgggaacgatgccagcttccttgtaactaattgcccaacacaggtcattgtgtctgcaacctcaacaggaaggctggaaatcttagcaagaatcaagagcctcacatgcagtgagtttagtgaggacttctctaagcgtccctggtatagtcttatttcctgcccgggaatccctgagcaagcaccactttttaatgggatttgtttttattatcagaacatccagtacagtagctgaggcagaaaagccatggcttaaactctggctgatataattcaactttgattcacgggtgtgagttgagctactaaagccttttaaaatgcaacaggccagagtggactcagaagactcatgaactactttgttcttgggtagtctgagcctggtattcccagttgcttataatcaaattcaggaatatactcagagttcaccataaactgactctaatatgagacagcgtgagaccacaagtcgcaccactacctttgttataaattctctgtcctctggggaccactgagaggagttctctgctttccttcatgctagatgagaaacatttctcaggtgaagagaagattactactccacccacctgtcatcacccacctgtcatcacccacctgtcatcaccgtcctaagagtgagcccagctatgctgcaggtgtgaatcccactatcccctttgagttatagatcctgtgtatcttcctccttccttcaggaagaccttaggaggcagaattaaagcccatcttagctctaactttatggggactccatgtctttatacaaagtctcattcacttagggctcatttctagatccagccctggaactaagataatgactcttagtctaatagtgcatagatcccagtgatctttttacaattattagaagttattaaacagtgctagcattgccacaagcctcggggataaagaaaaagtctttgggggaccctcggtcaagagtgtgtggcttcatacataacagaggcgatgctgggtggagcagaacacaggacgtgcagcagatgttgaatcactcaatgatgcaaggcttcacaatgcttagccactgttccttagtctaccaggagcccctgactggtcaagtaacttgatttctcctccaaatatgccagccttgctgagctttcaagattctcatctcttggctctcctgagttcacctttggatgaactactactactactacagtttactgacattgaaccgttgaggtagcctaatgtactttaaaaaaaaattaattcttcaaaaatattatgtgcacatgtgtgggggcctgtgcacatgaagagtgcctatagaggtcaaacgagggagctggagtcccttggaactggagttatgggtagttgtgacacactgatgtgggtgcagggagctgaactcttctccaagagcagtaagtcctcttaacctctgagccatctctctatcaccagtgtacttctcttgatctcaccaactagtctctctaaataccattgcccttcaacttcattcccatggcttgctcattcctggtggatgctcgctgtgtctgtccaatggccacttgactttaccaagccctttgctttttaccctgcaatgaggttaaactgcattgtttctcatcagtggaaaccttcttctttcagttgttaaggtcaaaaacttcagagctccagttgactctgatctctgctcttggactttaggtccttgtctataaatacagatgttttcaaaccatattcaaattttaataacttttttacaacttctagtgggatgtcctaccttaacattttttttctgtttgccccctaaacagagacagcaacatcctgtgtctgccctcagagtctttagaatagaaatcgttagattgcccattcttctgctaaccaactgggtctttacccagtgaacctccacaggtaaaccaggttcagccctctgccaagtgtttcctagttcttatgtctaaaagagaaagaattcccagaagagaaaaaaagggattgggagaaagttggtgaaagtcttagataaacactcaagagttgggtgtgggctttgaaagaaagaaccatttcctgaaatttttcaaacaaaggattagtttttagttaagatggggaacatgcagggcattccaggaatggggtggagtttttccagaagagtgtttaatttttctttctgtcccatttgggtatagcatgctgtcagatgtatgatggggagtgctggcatttctccagcctcagcaccaaactgtcaaaggtgcacacctttataccagtacccaagagtcaggcagatctctgtgagtagtaggccagcctggtctacatggggattcacagggcagctgagactctatagtaaggccctggctcaaaaattaatttgttaaaggtgtaagttacattagataaatatacaggctagtgtcagtaactcaagaaatgctttgtggtacccatccatgtgatgtaataatgcaagtcagcactggaggtacaataacatttttcaagcacgaacttggaagccaaatgttgaacttcttagcagtaggtctctgcagtaatcatttcctaaaggataattatatttattttgctggattttaaagttcatgtcattagtcaaatgtgttggattcttatcctttccaagtactgattatagacacagtatttccagatcctgctcacatccagccctcttatagaagtactacatttgcatagtctctgttaactgacatatggaattctcttcttccaacacccatagaaaagtatgctccccgcattagcatagcctcttcaattttcgaacacttgctatggactgtttcaagcatacacaaaagatagaagactatatgaacctataatgcaccttcaaaatgccttgacatgtgagggtaatttctgtgccttttgctgtattgttgaccttccttctttcatatcccagttagtgacaatggaaaggcaataaatagaacattccttatgtttatttttgctcagtccccaaagcacacagaaaacatcctcagaaaacaaaacacaacattgtcatcaactaatccctgaacttttaacagttgctgtatttttttcccttcagattgtgatggtttgtatatgcttggctcagggaatggcactggtaagaggtttggctttgttggagtaggtgtgtcactgtaggcatcagcttaagaccctcatcctagctgcctagaagccagccttccactagcagccttcagatgaagatgtagatctctcagctctgcctacaccatggctgcctagatattgccatactcccaccttgataacaatacactaaacctctgaacctgtaagccagccccaattaaatgttgtcctttataagacatgccgtggtcatggtgtctgttcacagaagtaaaaccctaattaaggcaataggtatccaagtatatgcataatcagtttgacttcgtttgagtatatttaaaagctttaggcattactttttaaagttaattttgctttatgattgtataaagtaaggcaaacccattaaataaagtacttcaaaggaaaactattctataatcatgagcgtgccaatgtagagcatttgttccttatttacagtattttgttttagcctcatagtttattatgatgatttaaatacctttgtgtctgatgcatactatttgttgggatgggttccacaaatatatggttggtaattttgtttgagggttgggtatctccagcctgtggaaactgcatagctcaacaaactattgtcaggatggattatttcaagtctgactgattgtacattcattcctcttttcatatatacacatttgcatagcatacatacaaataatattaactatctcatgtagtatagagcatttttcatgtgtcttccctcgcattgtattggggttttctcatgaaacggaaccttattttatttgtccatatttccttgagcaagcctagagcagagtgtcacctgtaataggagttaaagaaagatgatttactaagtaaaagaaaaaagagaaagaataatgacagaagtctttaaacatgattttgcatagataattgaataactgagaacagcaatcttagaaacacacagcatattatagtatggggaagaaacaggagagggacaagggaaggagagagaagctccgaaaggtagaacagagggcagggcaaggatgctaccaagtgacagatcacttcatgcagaggaaatggaagcctctcttagaaatggcagggctggagagctagcttagtggttaagagtactgtctgctcttccagaggacccagattcaatttccagcatccatatggtagcaattcacaagctcctgcaactccagtttcaggggatctgaagccatcttctggcctttgtgggtaccaggcatgcaagtggtacacagacatacaagcatgcaaaacacccatacacataaaatattttaaagaagaaactgtgagactttgtatcactagatatttctagaaagcactaataagaagtcatcacatatggatcaaaatgactgagcaaacaaaaacatgaagtgctggagaggatgcagagaaattggtccctcatccatcactgctaggcatataaaatggaacaaccactctagaagacaccttcatagtttctcataaaattaaatgagtaactaccatatagatctgcaagcagaaaataaaccagaggccatgtagaatgatatcaacacaaaaataagtgcttctaattaattaattaattaattaatttgttaacaaaggtttgtatggcccagatctctgttaaatgcatgtgtgttccagtttggaagtccccatagagaacactaatggataacttaagtttctttcatatgttactaaacctaggagatgtttttgtgtctttttctagccttactttttaatacttaggatgaaatattatgagataaggtctctttttaaacactaccctggcacaagtttgtctttgttcaaaatcttgatgtaactgagcatgtttttaaaaactaatgccaaagccaggggaggggcttggttgatagcaaagcaggtgcttaggtgggatgagacgttcaggttccattctgagcaccaaatcccaccagccagcccactgagcagcacaaaaagtaatgccagcagttgtgtcttcttgagtttttctatatttttattttagagaacctcattgactgtctcaagaaatgcaaaccacagatgagttgggtttatcctatttaatacctgcctagtgctgaattgacttggtaatccacaagttttcgttaggatatttttcagggctataattacattagaaagcatgtcctagtttctcaaggttatactgctgtcaggttccctggatggaagcagtcagaagcaggtaacaggcaagtttgttcattcatacattcattacattgcatcttatgaggtgcctcttgagtagcaaaccttgagtcttattagaggaaagtgagcagggaacatggtgatgaatctcttcctgcccacacctgatgtcagctgtctccaggaagataagggtaaggatgagatgccagagaagcataggacacagagggcatatacagaggttcgcatgtcatacttgcaactcatggtacagttgctggggaaagtgtcaccactgcaactgttagaaaatacacaggagaaagaagtggggaagaaaggaatacactataggcagaggatgtgcactcaagaaactacaaatagcttgtcagatcaaatgaaatcattaaattgctggcttttcaggtcaaactggcaatttcatgtagtgcaaactaccagtttcttgtggctgccgaagagagaactgagatgaaatggcaaaaggtgagttgtgagcggggtagggctagatgtggacagaccacccccacatactttaagctgagttattctggttgtgtgaattataaaatattgatcagaatctctggtctccaatcaggtacccatatctttctttatcagctgtgataacaacaaaacaacaacaatgaagcaaccatcactctgacattggcagaggtcctcctgggtgtcagagcccattgccccatttgagaaataccaagaaaggatctgaacccagaaaagtatggaaacaagtcacagagaatatagggtttgtcctgatacaaaacgcattctcagagatcagacatggatgcagaaccacatggctctgtcatgagaatcaggcagatgtgtgaggaggaaggatggatacaggaacagcaaggaggaggatggtatggcttgaaaacttgatcacgaaagtctggtgggggagtggaaaggtgaatggaaggaaggattccatctcaataccacgatcacagtcagagggagagagagaaagaggagcagtcagggcttgggcacagtcaatagcaccatgtcaggcagaaagctgatggaatgttcctgcctgagacagggtggaatggtgatcattggaagtgtttctgtccagtgcacaccaggatgccttctccagtcttttcattcctaccctgcacatcatcgtctagaaaccaactgtaaacaggttttcatattgactaagagtgaaacggactgattctcctgggacctccatatgccatgcttttccctgcccccaagtaatctcaaagtcaaattcttctacccataagggcttcctgcccttcttcatctgctgctttcttggtggtcctaaaaactacaccatcttgggtatcctaagcttctggactaatatccacttatcagtgagtacatattgtgcaagatacaacttgccaaacgcatgaaattcaagaagaacgaagaccaaagtgtggacactttaccctttcttagaaatgggaacaaaacacccatggaaggagttacagagacaaaatttggagctgtgacgaaaggatggaccatctagtgattgccatatacagggatccatcccataatcagcttccaaatgctgacaccattgcatacactagcaagattttgctgaaaggacccagatatagctgtctcttgtgagactatgccggggcctagcaaacacagaagtggatgctcacagtcagctattggatgggtcacacggcccccaatggaggagctagagaaattacccaaggagctaaagggaactgcaaccctataggtggaacaacaatatgaactaaccagtaccttggagctcttgtctctagctgcatatgtatcaaaagatggcctagtcggccatcactgcaaagagaggcccattggacttgcaaactttatatgccccagtataggggaacgccagggccaaaaagggggagtgggtgggtaggggattgggggggtgggtatgggggaccttttgggatagcattgaaaatgtaaacgaggaaaatacctaattaaaaaaaagactacttcatcaagaagtcctcccatgatctctctctacagtcctagtttagatatgcttgtattattatttttcagcatgtgtgtgtgcatgtgtatgtgtgcatgtgtgcatgtgtgtgtgtggagggggtatgcctttctccaatgatggtttgtttgctttgcctctccttgtaagctgtgttagtctgtaatctcaatgggaacagagagacattaacattgctactgcttggtttgcagcacgtgacatagagtctgtcatatagattgtaaccagggctggagacgtagctgagtaatagagaacttctctagatgtgcaaaatattggttcccattccaaccactgcaagacgataataatttataatgattatataataatgtggatggtcaataaataagtttaccaactgttccaattttgacattttttccaaggttggaggcagtagtagagagagtgtgtgtgtgtgtgtgtgtgtgtgtgtgtgtgtgtgtatgcatatgtgtgttacacagaattggcagaaaactcaaagctcttccacttcacattcccactaagtggaactgaagagaagggggcaaaggaagaaaagcccacaaagcattttgtgttctcaaggcttccctgtgggcatatggggcccatcccagtcaggaatacagagaatgcttacctagtgactaatggagagaaagccaaacctgtgtctccttgggtggaaaactgatctgggtgttaattgccccccatgattttggcatgcacttctatgctcctgtagcaagattgtgtgcagtgtttcaaggacattctatagagggaagggagtttggaaccacttaggcctggccacggccagtagcagaaactgagggtccatgagagaagactgagagacaaatagtaattgaacttggacagcctctgattgatggcctttgcacatagaactcggctgcttaatcatgctaaagatactgctgtgcctcccccaaggaggtcagcaagcatctttcagaaagtaagcctcctccacaagatctctctctctctctctctctctctctctgtctgtctgtctgtctgtctgtctgtctgtctgtctgtctggtgcttgaaggattggtgggcaaattgagaagagggttgtagaagattctgctctgggaatgacatgaaaatgcagactttaaattgttctcctgtcctttttgttttgaaataaatcttaaaattatattttgaaggtagaacacatacaatccatcacacaataaaatatctcagacagtgttctcctgttcctattcaccactatgttttttattactgtagcataatgcatgtaactcctgtcaccattattggactctaaaggccttctttacttcccaatcgctgtgtagcatgattagtccatataaaaattacatcctccctatccccagctccctttgcatccacagtgagatgtgatgccatttttcatttttaatggaaacttcctcttgaatgctttcatattatctggaaaaatgagcctggatattaaacaacaaagtgttttgatttataaggggaattatctcatctgcaggcatagtaaataaaatctatctttcatggacatattaaatccatattttataaaaaaaatagtaccaatagtgtgtttgtgtgaatatccatggacagataaataataatttaatactatactgcttccagtacataagtaaatgttgtataaagtaggcagccatatactttaattattattcctattttaaatgacttacttttgtgttatatgaagctactctgacatttattatttcccttataactctatattctgtctttttataatgtgcaacaaatcttcagtaaaaatagctctttggaatacttgattaactcaacaaaggtcaatgtggcgaagattgtgcaaagatgtgtcccatttgtaatgttctatttttattatgggagcagtaaaactatgaataatcttatttattccatttattctttagtttatataaaattatatcctacagttatcctgtcacaagcataattgactagcctggtgcctgaaatgcattccattttatcttctcagcatgaataggcttgaaacctcctggtcatgtttttaaaggagccccgacagttgggagaataccacgtgtagagcaaaggctgaagcacatgcaacaaaacaatgtatttggaaaacaaatagattcttagcccttgaccttggaacatgactctagtctcctacatttcttcattccacaattgctgagcctatgccagcagctgctctaggggttgggcatgtgaaggtgagcccaggcaggttcgataccttgctaggggtctgtaatcagaagagcagagtgtgtgagaaaatgctagcattcaaaccagtagcagccatggaagaataaaatggattagggatagagagcatacagttgtccttcttgagtaggtctgtcaaaggtggttcaaaagagtgtgcagacatcgggagaaggacacccgtgtctgaaagaacacagtacacagagatcctggagaagagctgtcaagatggggtcctgtgtgtcacagccacatggctaaggaaccctgaggtgagaaacatggtaggacaagggaatgaagagtcactgtggaccagatagatcatggctgctcccataaaggccattggaaggaatctgtattctagcttaagagtgatgggggaggtggagaggagagttaaaaatatcccctttcaggctatgtaggctacgctggctaccgggtgaacatagggtaagggtttctcattggacacaaaagatctgtgaaactacctgggcaagaggtgaggacagctgagatgactgtgttggtgggaatagaaggaagaactccagctttgattggagtttagaagctggtatagatcagtgatgcagtcaatacagagaagacataatcaaggatcatccctaagtttggtgcttaaagggttaatgaccttcactcgtggtgtgtgtgtgtgtgtgtgtgtgtgtgtgtgtgtgtgtgtgtgtgtgtgtatctgttaattccagcattttccctggtgccatagccatagtccacctaggctaatcccttctgtgatctatctttctccctggtacattctgaaagcatcaatgtgcattgattttgactgaagttcctaggggactggaagaacatcctgatggtggggaaagatcccaggattttgaaccagagaaccttggctcaaggtctgtcttgggccattttccctttcaggcttaagttccatatctgagaatattgtggagacagtagttagcatgggatgacaggagattgtgtgtgctataatcatggttgcttaacatcaattgactaagacttgtgtgtatgctgtagtcaggtgttaatgaacaatgggatgagttctgagacatgcatcattacatgattttagagttgtgaaaacaccatagactatatatagattgtgcttatacagccctatatgatatcaatttgcccctcagtgtgacctcttcatgtaactaagtgattcattatacatatgatttatgaggaagctgactgctgaacacagcctaccatttttacagtaagaatattagttagaaggaatgtttaaccttcaagaatctgtagagagaatctcttataagcaccatctgccaataaaaaaaggcgatggccaataagatgaggcaggaaataagaggtgggacattggcaggaagagaggggattctgggaaatagtaagagataaaagagagccacaggggatgagatgagagatgaggcaggagacagactgaggagatagactgaggagagagactgaggtgagagacttaaaccagcaggtagaagaactctgaagtgatgataatatgctgatagagaaagaagtggactgaaggtgagttaactaaccaagtaatagacatagaataaatgcataaataaattaagagctagtcaggaaatgagccaaagtatttggcctaggcatttaataactaattagtctcagaatctttattctgggagctggaactgggaaagaaaaactgggaattcaaaaattatttttttacatgaggccctgtgtttgatgccatcaaaagaaaaattaaaaataagtaaggaagtagagtgcaccctagcacagtagacatcctgtacagtaaggaaggaactgtctgctactcactgtttcccaacatcacatactgagtataattgtatgatgtgtacaacagcagcctgcctccaccagcccctctcattcaggagtaatagatggctttacagtagcacaattgttatgtcagtaggtaataggaatctctacttccattaggtttcttttttctccttctcctcctccctctctccctcctcctcttcctcctcttctccttcttcctgttcctcctcctcaccttcctcctcctctttctcttcttccctccttctccccatcccccacccatacttttttcaagacagggtttctctgtgtggccctggctgtcctagaattcacttgtagtctaagctggccccaaactaagagatctgcctgcctttgcctccccagtgctggggttaaaggcatgcaccaccactgcctagttgtttttttttttttttaacaaacaaacaaaaaacccaaaacagagtctcactatgcatcctggcccaaccctgactttacaatcattctgtctcaacgtccagagcatgagcattactgacctgcatcaccctgactagcatttcctgaattatggaatcactgttgtgcatgagatctgccaaaccacagacaagtagatgggcaggcatacaatatgtgcttggtgcttttaattaaagatgaattttaatcttatcttgaggtatccatctgggattacacatttctttctctctatagctaaagtcttagggaaagtttgcttttcatcataagcagcttcaaaacagtatattcattttcttaaagcattataccagaattgtttgacgttgagtacatagtgagaaaaatgttatcacaagctggcattatttttctccatgtaatcaccattgctttcctgacaaagcccagagataacaggttaaagtcatcactaagaatccttttttgttttatgatgaaaacacatttctgagaccacgtagggctttattctccagtagcactccagcgactggactatttggaaagcatgaataggctcagctaatcttatacatcctgcattttcttaattgttgttagctggatttattttattttatttcatccagaacacatttaatttggaatcattcccaagacatgtaaaagtgagtgccaacatcttttcaaacacaaattggatttaataatgtttatgttgaacatgagcaatttagttatttcttttcacataaatctcttctcctcatgctgagcagacctccaggagactgacacttattatagattttctcaatcaattaatatttattgagcctgtaatgtgtgtggaaaccaacactaagcaggggaggggttcaaaacctcgagtgtagtctggtctctggctcacaagttaattattgagaggaagctgagcagctacgtctgtgaggaagaacaatcccagaggaacctaaggcttgaaggagcccaggatggcccctccttacctcttgctcaactcaactggatcctgcacacagattcttctctcaccctttccttccacttgattgctttttaatgtgggaggcgatcaagtccctgggccttcttgtggggatttcagaaagctttgatgcttagacttttgttatagcctggtatatggatctctgagtgctctccttgaccttcatatcccattcccctccaggtctgcaaaatctgaagatctctaaagtttcatgtttggtgtattagtgtccacataatgttgaaagtttgtaaaggactttgcacgctttctccttacagtggtcgtgaggcatgtactagccttctgttacagcagtaagtgtgtgaaacaatcaggttataaagaagaaaagtatgtctagactcacagtttcagaggttgcaggttcttgtctttgggaccatggcaaggcatggtatggcaaaatcattggcctcatttccaggacagggatggagagatggagtcccacagtagtctttaattaagacttcaccttttaactattccaccacttctcaataccaagggatggggactgggcctttaacacagaaacctcttatgaatacttatctaaaccatagcaaaaatagagtactatttccccatttatcagtaaggatatcatatcgtagagttaaacagctctgcaatgcatcccagctagataacaaatatttaaaccttgaggttgtgactctgaaatctgtgtatgttccacctaaccatagcatctgtgattataagaggcactacaaagcccttgaggattgatagccaaacactatggggaaagacacctgctatgttctaggcaaacaatagggatttacggaagaaaaatacatatctctttctcatccctgtcttgcagtggcccaaacattataaaggagatgttttcaatggattgcaataattttaaagaaagggattgtttgagtagttagagctttctatagttagacacagcccttaacaatatttcatgcatagtaagtgtattttatacacagtagtatattttatccacagtaagcctatagagtagagggctagtcattttccccttagcttgcttccctgtattctgggtgatgtgtgtgtcctgtaatgctggcgcctttggccaccagtggtataactatatgagaggtttcctgctctgtgcctttatttagtttttctttggagttgacttatccttatttcctgagagtctgtgtttgattcctataattaatagggaagctttaatgtggaaagtacatcttcaagtgttttcatgagaggtgttggagtttatgtgtctagaattgaggttttttcttcttttaggtttccttcttggcagtcattgcccagcttttggaatggcatgaatggcaatctgaagcacttcctacctcatacactgtttctaagtaaatatttgtacatgttgctgctttgttacagaaactctgggatgtgcaaggcattcccaggaaaggtgataacagggaaatcttaagtggtctagatcacgagcacattactgcaggaagacactgtgtctcctaagctttgtttctacctaaacagagatctctattctcttgttccttttgtaacagagcacagatcaggatggtttgtgtgcactggccttgtgggtattcctgacagcaaggtcatggattcttcttccatactaatgtcttatacttctttatttcatgcttcccctcttttttattatttatttcagtagtttcatagattatgtcatctgattatattcacccctattgctttctcttagcccctcccactcccatagaaccccttcttcccaactaagcttctatttcttgtgtgttttggtggaaggaggccactgagcttaagtagcatggcttgtgtgagcatggttgagaacttatctgctggaccatgagaaatctgctgaaggaaacagccaggccttcttctagagcccatagccaatagtcagtccctcgggagcagggcgtgagggctcatgctcccctctccacccatggtggagcatctgtgagcccagccttgtacagttacccatggatgctctgtgttcatgagcacattccccatgctgtgactagaggatggtttcatatactgctccccacttcccaagctcttacattctttctgcctcctcttttgtaaggttccttaagtcacaggatgggttaacacaggactgtgcacttgtctcttattctcagctcttggggcagctatgattgctagtgtggttgctgtgtaaactcctgtttagtcttctttcactaaggccaatatctctttgtggtctctgttgccatgagtcattattctcttttgtcacttgagagagttccaagactgcctttccccctgcccccagccttctaagcatctccagcatttagcacatactgcaaacctcagttgctcttgtacctcctgactcttggctataccatccacttcttgttctgtaattgtctaatgagtcttcagaaaaatggaaagtaacttaaatgttagatgcttgctttagtgtcttcatgaaagaagtagggtctttatttaaacagaaaaaaaacataggcagaaagtaaatttcatgtaaggaaaggggacaagaacgcaggttagttacatagagccaattttggtcacaggctgctaggaatcctggaggcatgaagagaaagggccatctgctttgtcccataggctggctcccctctgagcctccttgctgtcctgagccaggtgtgattctctaaagtcagcttttgctctaggcttcttctagcccaggcctgcaggagacagcacagctaacttgggggaggagcttgcaggctgatgtgcccccttgagtgacattgcttttaacagagtggtgtgttcctcttacccctctccaaagcgtgccgggaggcagagagagagcggtgatgccagacatcagactgcgcttgctttagtcacagtaacctcacttctcatcaggtggatgccctgggttttaaactaccaaatacagagtagatactgtgaagtcctaggaaaacttttgtctggttaaattattccttcacttgtctggctaaaagaatgtaaaaacctttcttcagttaaatccttggtatcgccactcccataaactaaagtccccctttaaaccatatttaattttatcatttgccagactttagtatcttcccatacttataaattgtacttaaaattttctaagcaattgtttgcctctcattttctatttgctatataatagaattattgaaataatgatcaccccttcaaaactgtaaaagtaaaatcaatgtacatatcaggtagagccccaacttttgatcatcttggaagctgtagcagacatgtttcctcgggcattttccaaggtcttttgcatgaggaatagggagaagctctcattagggtgaagagagtcttcctgcagactaagctcgatgtattctcctgggtcttactgaagacagaattttatggtgggctgcatactgaaataaaaagatcttattttttttctattccactgtcaacatgctattggacatttgtattctgttacttttctccttctgcagcaaataaccatttcagttattttcagccttttagtgatcaggataaacaatccccccagggtccccccagggtcattcaaccatggcatcaaatgccagacactttatagaatttgcctcacagcatgttgtataagcatattcctttgtttggtattataataaggattgaatctgaaatttgagagctgaacaaagtccaagcagagaagaggagaacaaacgtttttcttgtatctttagttatctctgcctgactctggaataagcatcacttggtgaagtcttttttcccagatgcccccgggggggggggattagggggggagggcagggtgaccttcataatttctcagtaaaatccctctgagcagcacctttcctgatttacatgtttatgtccagcacaggactccagaacggctacctattgtagccacagcatagcagagtctcactgtatctcacaggctggagaacaagttctccagttgtgattatatatggcctctttggttcataaaagagaaaggttggtatgtccaggtttagtgggttgtatataaatccacacacttgcctgctccttggagctattaaatgatatatattttatgatcctattgtttattaatctcccaatgaaacctaactgcccattgtagagagatgattggtatgcatgcctatcattcaagcaaacttgactccttttatatcattttatattagacaagggggcatgggaaatctaaacaggctgcctccttgttctgttgctttaggtttacaaccaaagaccttagttgctcttttccttaaagcagcatttctcaaccttcttaatgctgtgaccctttagtacagttcttcatgccatggtgacccccaaccataaagctattttgttgctactccataactgcaatttctctactgttaagaaccataatacaaatactgatgtataggatatctgatatgtgactcctaaaggggtcatgacccacaggttgggaaccagggcctaatggaaatttaagaggttttcttactagtatagtttccatcattctgtaggggatctattaggtatagttatagatactatgtataaccatagtagtatcataaaaaaaatatctagacggggttctttgtaagagatacatacatacttcttattttggtcactcagcctatgcaaattatcatagataacaaaccttttgagaataagatgtgtattaaattacaaatcctcttttcattaattatccataattgagcatgtacacccgggaactggcttttaaagttagttaataattatgttttcatactcaatgtaatggagtcctgtgggaggaaaaatggacctccagccaacagcacatggaagccctcacctcatggttggcatgagagaagacaatgtgatttcaccgtacattttctacaaaatcaggaccaagagcatcacccaatcgttcgtctgcatgtgcaatgagttgggatgttgtaggaggacgctggctggagtccctgggatgaccgaaaaggatgtgaaatgcaaacacaaacagtactggttgcaaatggagtcgtaaagcccatggatgcggtgggttgggaagtagccatcctttgggtaaactgggctttgcagtgggttcatctggtcaagtattcatcccattggctgcactgactcttgtcacagtgaatgccaagctcaggggacttagtcacccaggaagagctagaagttgtctttggacaaacaaacatacaaagcagtacaggaaaagtaacccagtgaaacacactgggtcttccccgtcaggagcccctgacagcaaaggctattttcaattgcaaaagcacacaaaagcattttgtgtcatgtgtagaattgtgcgaagtgtggattcagctttgtctttaaattaaaaactcatgatttttctagtcgtgccaggactcttttgaggttgcactaaatggatgaacgaaagacagaagaatgagaagatgccgtgtttatgaaaaccagcagagacggctcccatagaaataggaaacaaaaccaagctatgtggaagctttcagagcagcaaaggagaagaaaactaaacaaaggagagcttaaagtagaaatctcaggaaagaaaataggtgatgggagaggtaaatacaaagcaagaaaaagagggaaacggacacacacacatctcaagtgtgtgtgtgtgtgtaactatagaggaaaatcttaaaagttaaaagagaattggatgggggaaaatttttgagaagcacacactcctgagtggcaaataaaatccaaggtaaacgaagcaggagtctgaactgagaactgctgattttgtttcagcagcccagccgcctcttgtggagaacgtgaatggaatgaggtgctagacccacgtacagtagacagctgatgtttgtttctggtgcaagccaaactgtccttggagaagctaattctatcctgaaagctatcacttcccacccaagagaaatgattttacacctgcaaatagttcatgaaatcatagcaatctttgaagaaatttgaaacacgaagctcatctttgataaaacatatactttaagctcttatttttctggggatgctttattgcttcctcctgagaccctctgaaatgtttaagtatgcgtatgtgtgttaggggagggatgtgtgaaggtgagttcagatgcctgcaaaggacagctcccccaaagttggagtcctaggtggcatgaaacatcacaatgtgggtgccaggaaggactccagtgccctacaagaccagaaagggctcttagaggccaagccatttctccatcccctcagacttacttttaaaggcacattaatgagcattttatggactatttcaatcagtaagatttcttttaagttctctataatgttggggaaaaaatgtcgtttattcactcttcagtgtcccgtagccattcttacacctaaacagttctgtgtgtgtaatacatgtgggtgtatgtgcaggtgtgtgcagctgtatgttaaggccaggggtcctgagtgtgtcttcctctactattctctttctttctctgagacaaggtctgccactgaactgacaccaagtgtgcaagctccttgcacacttttcagtaaacctgagttcagacagttccccctcgctaggcacgctgaggacctactgtctgtagggatatgagaacagcgagtctaagcacatagaattatttataccttatacaacgattgtcatataattggatgacattggcttggttgagtgtctgtctaagctttgtattttagcaggcttcaatagtggaggaacatgaatttacaaaccaaccaacagtaattagtataaggggtaatctatatcttcatcaaaagtgaaaattaatttcatatgtgtgtatatgtatgtatatatgtatataaagttaactttaacttttgaagtaaaatttaaaatatttacacctttagactagacctatacaaatttagtgaggagtacttatggtcaaaagtagacttattatcgtatatacaggtatagctcatatacacaatagcaccaacaattatttggtaagttagagcaaacagatgcagagtatcttctcagtatcaggactacccaagtaacaaagtccctttatcagaatgctactaaatgctaacagcagaaaagccaagacctttcttgcattggaggtatttaaggtctagtctagctgcctcctgtgctatataaaaggcaatatgtattggctaacttgtgtgtattaaacctgtgtgcccttaatgctacagacatttcataacatttacataaagcttagacatacctcattttaagcacactggtgcatatacatctagagttacagacacactacatagggcaccgagcataataacctgaagcactgcgtacttagccagtcttaaaatggaatcatggaagactttaaaacagatgcccgcttttaatgatttagtttgtcaaagcaacaaaaacctactacctacagcagaaagcaaaagatattatcttgataaacacaaaatattagtgtattctctttaaaccagtgtttgtaggcattactaatggcaggtcagtgtcttcagaaagccttttagtggcttcttataatttaataaaagtctcaggaagctttatttgaaattaaaaaagatagaccctgagttttaaagacctaatggcaataagtataaatacaggcaaggcatgtggtcacatttttggaaatttttctattttctcttgacaacaaatataccatttcttaaacatctgtttacgtcctgtgtgctaagaggagtttgggatgatttagcaatttcaatttatatgagcactcatttacctatgaactattttggtaccatggaagcaatatacaaatataacatgtgtgcatttagacatgtattgtttacatccaccgctgtacataaaatatgcacgtggattttagagtcactatcttacaggtttttagagggcagctctacttatttcctccacagcactaaacagccctcaatcccaaatctgtacttcaaaaccatggctgtagttcaaagccactacagagacacagaacataacctcagtgtcacagagaaggccctaagaggccagtgaaagcaataaataaataaataaataaataaataaagtccaaagctgaggcttgtcatgtagatttatgatccttattttaagagttagtcagatggacatggtggtacatcagaacttgagggatagaagcagaagggtcataagtccaaggtcatcattgctatgggggaatattttaacttctgtgtgtcggtggtatatgcacagctgtgtgtgcacgtgtttaagcctgtgcatgtgagcaaaggctagatacagaggtccatttccctgctctctagcatcccacctcattcccaggagacagggtttctctctgactctagagctagaccgacagatgaagcccaaaggaaccctgctgcctccaaccccatactgcaccaggctacaggcacgtacacctctacagtgaactctttacatgggtgctggagattcaaattcaggtcttcatgcttcctcagcacgtgctcttacacacttaagccatttgtcctgctccgacatagggattttaaagccaatgtgagttacatgaatccttgtttgtttgtttgtttgtttgttttttaaaaaagcagggctaatctgacccaataaagccccccttaagtcctctcttctctctttctcataccggagtaggtgagccccagaatctgaaaactgtctgtccagaatgcaagaaagcagacaagaagagaacatctcttgttgtgtctagtacaaaaaacaaacaaaccaaaacccagtggttcagtgaacacagagaatctaatattgcttcttataagtaatactgactatcccaataaccttgtaagcatttatagttgtcataatgcatatggccagttaggtattaaaacacttaactaaacataggccaggggtggtggcacacacctttaatccaagtacttaggaggcagaggcagattgatctatgtgagtttagggcagcctggtgtatatagtgagcttcaggacaatagggctatgtagaaagaccctgtcaaacaaaaaaatttaaccaaacagcattgcttatgatcaaatatacaatatacctatcagcaatgaattaatgttgagtcgccttaatgttgagtagcaactctatactaatggcagaaatagccacccttaatgtctataaaatagacatgtgtctcttgcattctcgcatgcctcctggaagctatgcaaaactgtctttgcatatatacccagtctcccaagttttattcttttagttcacaaatctacatttcaaatttgcctagtgtgaagctatctggagacttctgagaattggcaaagtcacattttataatttgcccctcaaatgcaaaacatctgtcacctcccttcttggcaaaacttaatatatttggagcaataacaaaagcctacccaaccccaagtgctattgttcagacaggctgggtatcttccagaatttcatcatgagcaggaaggtttatgccatagaaatttatccaacatctttgacaaacaatatatgacaatttttatagaaacagcattatcagttaggcactataatcttagctattggaagactactgctagagaaagaatcattgttgtaagttaaagaccaatcaaccctacatagcaggccctatctcaaaaagaaaacagaaggcaaaaataaatcctaataaaatactcaatttaataactgtatattaaaatacccttagctattttaagcactagtatatgtataacattatttatatgtgtgtgtgtatacatatatatgtattatataggtaaatgcacacgcgcgtgtgcgagcacacacacatattatgtaaaccaattattcttaaaatcaaagactaaaactttaaagcaatatcagttactcattttgattattttataatgcaaataccaagtgatttgcccttatgtcagttgttagataagaagtagacaagatacaggcagacagaaggcaatggcaatacataactgataaggggccatcaaactggaattcctatttgctggtttaaatgtgctctttctgattcttaacaaggcaacaccaggatgtgttgactacagtcacaggattggaaggctctgataaatatttgtttcttggatgaatttttctacccctgcatttgtagctgttttgaggcaggagacccatgcagcccttgtaatatgatcactgacttgtaatgtggctgaagaggcatggaataattttgcttctaagtgctgtacacatagccacctcacccctcattggttacctctgcattttaatgattaggcattctacatgatgcaaaaccttctcttcaaaattaatgtatgaaatattccattatgtgtaacttcggtcttgggaaactaaagtctacacaaatatataaactatttcattgtttctttgctaggtcaatttcctatctatggatttagttgcttattatgaaatgataagcaatgtcaccgaaaagtcttggtttccatggctacagctcttttttagacctcggcttgggaaggaagctctcccccttaattacaatcctttctgccaggtgggggtagcacacacctttaattccagcactctagaggcagaggcacgcaaatctctgagttcaatgccagcatggtccacagagcaagttacagaacagccaggactacagagagaaaccctgtttcgacaaaaccaaaccaaaacaacaaaaagaataatgacactctctgtttcttactctagccttagacacattcctaccctccactgactaaaatgtataccaagaatatactgacagttgtattgcctttctacaaatattatatttgttgtttcagcatggtttcattggggggaatgccttttattaccactgtattatagatgttaaaatagtatataatacagtatacactagtgaagcttcaagataatatagattcatcacggccttgttcatctcagtctcatcgtaactatggcatagagaatgacatcaactggattctaaattgaatgtgcatttctcattagtatgaggaagttttgtacttcactaagatgtgttatctattttatttttaaacaggcacactaaatattttattgtcttttctttctctgattatagaagacatcaagtgactttccaccagatgttcattatatgctccaaaccataaaactcattcacagcagcatcatgctggaatgctacatgtcattaagctactgtaataaactacattccttgggctggagagatggctcagtggttaagagcaccgactgctcttccaaagatcctgagttcaaatcccagcaaccacatggtggctcacaaccatccgtaaagaaacctgatgccctcttctggagtgtctgaagacagctacaatgtactcacataatgaataaataaatcttaaaaaataaataaataaataaacaaacaaacaaacaaactacattcctgctccttgggccatttaataatttcttaaaatggttaagattcttcactgttgtttctcctggtcaaaacagctctatctcttaaatccatctggtccaaaacttctgttagttccaatgtgtctctgtttagtttgtgtttccatgatgtgtctatgaatgaaagtgaagtgttgaagtctcccactattactgtatgaggtgcaatgtgtgctttaagctttagtggtttcttttataaatgtgggtgcccttgcaattggagcatagatgttcagaattgagagttcttggtagatttttcctttgatgggtatgaagtatctttccttatcctttttgataacttttggttgaaagatgattttattcagtattagaatggctactcaagcttgtttcttgggatcatttgcttggaaaattgttttccagccctttactctgagttagtgtttgtctttgacactgaggtgagtttgctgtgtgtagcaaaattctgggtcctgtttaggtatccagtctgttagtctatgtctttttattggagaattgagtccatgatgctaagagacattaaggaatagtgattattgcttcctgttatttttgatgtttttttttgttttgttttttgtttttgtttttttgtttttttatgtttgtgtggctatcttcttttgggtttgttaaaaaaaaaaaaagattactttcttaatttttctagagtgtagtttccctccttgtgttggagttttccatctattatcctttgtagggctggatttatggacatatattgtgtaaatttggttttgttatggaatatcttggtttctccatctatggtaattgagagttttgctgggtatagcagcctgggctggcatttgtgttcttttagggtctgtatggcatctgtccaggatcttctagctttcacactctctggtgaaaagtctggtgtaattctgatagctctgcctttatatgttacttgacctttttcccttattgcctttaatattctttctttgttttgtgcattttgtgttttgactattatgtgacaggacgaatttcttttctgacccaatctatttggggttctgtaggcttcttatatgtttatgggcatctctttaggaaagttttcttctataattttgttgaagatatttattggccctttaagttgagactcttcactcttttctaacctattatccttaggtttggtcttctcattgtgtcctggatttcctggatgttttgagttaagagcttttcgcatttttgcattttctttgactgtgtcaatgttttctatggtattttctgcacctaagattctctcttctatctgttgtattctgttggtgatgcttgaatctgtgactcctgatttctttgctaggtttttttatctccagggttgtttccctttatgatttctttattgtttctagttccatttttagatcctggatggttttgatcaataccttcacctgtttggctgtgttttcctgtaattcttgaagggatttttgtgtttcctccttacagtcttctacttgtttacctgtgttctcctgtatttctttaagggagttatttatgtccttctcaaagtcctgtatcactattatgaggtgtgattttaaatcaaagtcttgtttttctggtgtgttggggtatccggggcttgctgtggtgggagaactgggttctgatgatgccaagtagccttggtttctgttgcttatgttcttgcccttgcctctcaccatctgattatctctggggtaagctgtacttgctatctctgactggggcttgtccctctttcatgcctgtgtgtcaattctcctgggagactagttctctttgggaagaaattaggtatggggagctgtggcacagagtcaactctgggatgcagacagaaactagaaggatcctgttccaggctgcttcttggttcctgtgtcctgagggctctggacaggtccctaggagtagaagtggtggtcttacctgtgttcacaggtgtgtcagcactcctgggagaccagctctctcccagtggtatttgggtatggaacactgtggcacaggatcagttctgggcacagatggaaacccacatgcattgtctttctattatatgtgtgcatatgcacatgtatgtgcacatgtgtgtatctatgcatatgtatttatgtattgttaatcataaactatggtactatggatccactggaactttttcttaacagatcctctgttgatttatactaatcttaggttgaaattggttaagctgatattttattgttgctaatcacatctttgtctgttttatggggctttcggcattgttaatccagagatgatctcttccatggtagctaatttctagatatagaaaataatttgcttgcagatatgcttttcatatgcaaactatattcttgatcttaatctctcaccaaaagtagtatgtctaattcacttgtggtttaggtaccagacagctagagactacctctgtattccagagccctttaacattattctaactacccagagctaaacttgctcaagtttacctaccctgccatttttatttattcccatataaaagccctggcttctgctttcccttcactttcatgtctgctaacactgctattcttgtgtggccatatacaagatggagtgctcctccctttcagttactgtccattctaaactcttccttcacgctactaatctctctattgcttgttttataatacctgagaaataaaatcataattacagttcaaaccagttatacaacacagaaaacatattttcaagccatcttcaaatccccaaggatttgtgcttctattgttttgacacctttgacaggagccaaaataactacctaactacttcctctccattcctcttgttctttttagttattttctgtgttctgtgcaaattcatgcagagaagtgagctgtgtttggaaatagagcttaaatatactgtaacctcaaggaatattattctctagttcacatataccctgattgccacattgaaggtaaacatttgcacacaagcaaagctttgactcacaaaacaaggtcttaacttttcatttttgctgaaaataaagcataagcatggagatacaaagtgtacttgttcctccaacatcaaccacaggccctggagacggcactgcatatcatcatgggaagtataccgacacaagcattagggttaaagcatgttatgaaatatcagacagcagggaagataggactgtgttaaaagatattcccgtgagtggatctcaaggtactttgaacatagagataacaaaatctgaaaatgagttaatatcttttatgatgaggtatgggtgagaattttttcaaaggttacctaagcttccataagcagtttataactgggatgaagaaatatataccctaaaatgggctctgaggtggtgagctagacccaatagggagggacaggtctctttaagaagggcacccagagtgagtgcccctgagatctgaggctgtctctggggctgcagttcagggatgtgttgggctatgtttgccttcaagcttatgccctcaccgcagcacatctgtaggctcataactcattcctggccgattctctaatctatcagaatgacagtgtgtctgaaggatccatgaataaactccctgctggaatactctaaaggcaggaaaaagcactgaccatttccccagggacttaaggatttccccactgtaaataggaaatttcctcgtgataacatacactatttaaataagatatatgagcatttcactctgtaccaaagatggaagagtcaagaacttccataaatattagctttgatacatcatcctattgatctgcagtgggccccaaatgttctgaaagggtcttcaagaaaatgatcaaaaggaaatgctttcaaggctggccctttggtattggagacaactatttctccctgtctcaacattcctcagttgcctgtagttctttgtctatgcttgagacctgcgggctttttcccatcaatgttagtaaatctatgggtatctcattattctttgggtcttgcttaggtgacacttctgacattcctaggagactagcaaactctgtttctttggctcttacaagctttcagcttcctctttcacaatgatcctgtgtgtgtatgtgtgtgtgtgtgtgtttatatgtatatatatggactatatacgtataatatattatatgtatagtacatgtatatatatgtatatgcgtatcatatcaataattaaagaaaaagaagccataaacttgaaagagacaaggtatgaatacatggaggggtttggaggaaggaaaaggacaggaaatgaggtcattatatttttatttttaaaacaaactattctggacaaagttgttagcatccaccaatgtattgatatgggcttacttttgtagtttgtggaagagtgtttgatgttgcagtcttggaactgtgaaagggtgagggcagtaaacagcagaagagaaggcaccatctttgaatgatgtcttttgcataagcacaatagaagggagaggaaaatgggtgaggatatccatcttctccaaatagaactgttgaaatgtcaggaaaagaaatagcagtgcaaacagtttgaaacattagctctgcttctctgtttgatctcaaacaccatggaaactctttgtaacaagaggaaggaagagactaaggtgaagggagcagagatttgtttgctgctgccccgctgggattgcataactgaattatccttttccaggaagcccttgtgctggggttcaaggaaggattctcatagcaccatggttcttggaacacatttcccccttatcctcaacatctcatatcttagcagtgctggctctgtctccaccccctctagcaaatgtatatacacagtttatccacataatcacttgagtttaggggaataagcagagattggttaaaaggaagccaaaaccaggtaaatacagaggacagtctgtgaaggtgaaggctggtcccccagtatctaggtgcattccagggcactccagcactagggagccttgtgggttattggtgaaaacacagttgtcattcaggtactcagccctgagcacaggagtggactgaatgctgcctgcagaatggcagtgcctaccactgtgtgtatattgatgcaaatctgttggcccagcttagctggcttaaccaattctgctagctgtcccatgggcagaaagaacatgaaacaagatctaaaatgactgaatatgcaactcatagaatgtgaagggaaggttttgaagttttgaagatcagggaatgagatgacagggagctaaagtctcagaagggggctttggtctgttccagtaaatctccaacgcaaatatgccccagcaatgaaaacacaactcaattaatatgaatacatgctgtgtacatagattgggcagatctaccgctatactcccattttctccatctatgagaaaaaccccttagaacttgtggtttctccaggccatgtgcttttgctccacctttcttcttcttcctcctcctctgcatcctctccctcttccattttctccttcttccctccaccttctgctccaccttccctttatctgcccaatcatcagctctcctttattttacagattaaggtgggaagctggtttacaggaaatcacctgagtgctgactcattcttgtttgcaacacctcacaggagaatggaattaacatcaaatataattagccccagggctatacacaacattggtctgcttaggagacctgcaagagtccagctctctgctggttgtggtttcttctttaaactactttattgtgatgtagcttgcattctaacacgtttgtacagctcaatgctgtggaatgattacatgacacaaccctcaccatattcaactctattctatacccatactatactcctgtcctagtcactgtttattgtctatatgaatttgatttttttaagtgtctcatgtaaatggaattattcagagtttatctttttatgtgggcctcaatcagttcagcactcgctagctgctcctgtgtcagtggctccttagtagggataagtaatacttccgtgactagatataccacattttgtggtacatctcttcacctgctaattttaattatttccacattcaacagttatggattaagttgatataaacattggcacacagctctgctatggagaccctgttacccaatcctttgtcagcacattagttcttacttagccacagttttcctttcctgtggctttagttacaaattatgaactgtagtctgaaaatgttaaatggaaagttctagaaataagtggtttataagtgtggcatgtgattgaaaggtcattagtatggtaaggtccctttacaatgcctgtgttagtcagctcactgcatctcatcaaggaggtaccatattctctcacatcatcaaaagatacaaaagcatgcaagtacaagacacttagtccctttcatagtcttttcatgtgacattgttttgattgtttgattattaattactggtaatgtcttgttgtgcctaagttataaagaaaactttattatagccatgtatatatagagggggtgtttgtatagtctgagtgtgatagcctctgtggctttatatatctactggatcttggaataaaaaccttgtagataagcgagggtgggtttacctagaagagcaacttcacctactgagtcataggatggatctgtttacatttctggagaaaacatcatactgtgtttcccagagtcctctttatacattcctgccatcagtgtatgaggagggtgcctgttcctccacatggtcaagactgatttctgtggttttggatattgttgttttgctttgcccttttagttttaaatcttgccccttttgtgtacatgtatgtgcatgcacgcgtgcacacacacacacatgcactcgtgccatacaacatgtgtgccatggcatgtgtgtagaggtcagaagactgtttgtaagggtcatttatctccttccacaatgtgggctctgggcatgacactcgggccatcatgcttggcagcaaacacgccttacccactaaagcaggttatcagtctgctgttggcattttcaatgagtgtgaactatcttcatggttttgatttacaatttcctttagagatgtggggtggtttttatgtacctattggtctttgcatatcatcatctttgggaaatgcatcttcaaggtcttttccagtattagacagggttattttgtggctttgcattgtttttgtttactttgtttttttctatcagctttttgtatccatacctctggagctggtataagaagcctccatcgcataattgtcttgagaatggaatagcagccctagccaaaatgtgaaatcccattttttagatagaacagcaggacagtgctcactaagcttttatggaaaccatcttttgttgttgttgttgttgttgttgttgttttcattagttttgttcattagttttgttgtgtttggtttccaagacagggtttctctgtataacaagtctgttccttggctgtcctggaacttgctttgtaaaccaggcgggcctcaaatcagagatctgcctgcctctgcctcttaagtgctgggttaaaggtgtgtaccactatgccatttgtttgtttctaaagattaaattttgttgtaggaaagttatgaaactctcttttttctttcttttcttttttgtttttgttttcgttttgttttgttttgttttttgagacagggtttctctgtgtagtcctggctgtcctagaactcactttgtagaccaggctggcctcgaattcagaaatccgcctgcctctgcctcccaagtgctgggattaaaggcgtgcgccaccatgtcccggctatgttatgaaactctcaatctgaagtctgatctttcagaggactaaaaccacaggctctggaaccagtacccatgtaccattgagaagaatggggtccctttacatatgggcagacaacactgcaataatcctatgaggtatagtccctcaaatggcgtactctgccaggatgcagccctaatcctataatctgtctccatggcctgagagagagagactaggtgtgtatggtgagtctggactggaagatcagcagctcaggaatggtggcgaaggagagggcaccaggaaaggtaataagagggaatggcatgacaggtaagcagactgtcacctcagagcagagtaggaagtgggaagtgctgtttactggtactgtgtgggaaacagctctgaaggagagccagaggcagctggcaaagacgggagaaagaacatttctctgaggaaagaaagaaagaatgtgtaaaccacgcttgctctttgcctctctctgggtctatgatgggctaataatttattctgtggttaggagtttgtaagatatttgtgttgcttttgaagaagtgataaatatttatgccctgcaatggaagcatggagggactaagaacaaggctgtcaataactaagcctgaatgttgcttagacctgcatgagtcacaactacccttccattagaaagaaagcaataggtgtaagaaggccagtggaggaagcttggtggcccaggttgcattcagatttccttgtgctctatctggcttcctgccatgagctgatagatggctctactatggatggaaacagaggagctgtgtggatggcttgtgatgggatttttacctgagtctttgaaaacagaggctggtaaattaatggtgacgggaaggatagtgttggcttccacagtagcagtgggctgtgcttcattctcatggtgaagtatattagacaagattctctgcatctgtcactccagctgctgaaatatttagccctgccttttcttctagctcagtggccccacttgtctcttcacccatactcaaggatgctcctgtttcgtgtctgtagacttcatgtgatgggggaaggtccttgtgtcctgcaggaaagcccagcacagattcagttgtagatgcaagccagagtgggcaccatagaataaagaggacaatgggacagcactgagagatttgaaagggaacaagaataatggctgatttagaaagagtgacgagaaagggcacaggccatgaaagaggatataaagcttttctgttttctggtttcaactctatcatagcttcttggttattattcattcattcattcattcattttgtgctggatttgtttgtgttttgactttctggatattaaagtagcaagaatcatgtttgaatccataagactaatgcaagttattccttaaagtgttgtttatgaacactgggttcccttttggttagtattattgcctatttgtttttatctttctttatgggtatgtgtgtgtgtgtttacacatatgtgtggatatccatagagggcaggtgaggccttcagttgccctgaggctggagttacagggatggagctgtatgtaggagctgaatgatgtaggtgctgggaagtgaactctagacctttgcaagagaggtgaatgctcttaacaattgagccatctctctagccctagggatttctttttaatttcattgaccactgtcaaaacaagttaaacatgactggtcactacatacatttgttatatcctttttttttttttaatcacaaagagtgattttaaaaaatgtttttgagggaagggttttgtaacctgaaatatttcatcttccttttttcttccatttaagtcattcttttataacatcacttaatatataaacaaggtagagtacattttcatttaaaaaaagaaagaagtggagagacagagagagagagagagagagagagagaggaaagccagaaggtgggatggggaagaaagatctcacggggagcagggccaggaatatgcttttaggggtgtggggggctgtccatgaagatgtttgcttatgatggtcagcatcctttgctcatcattgtttacttttcttgttcctatgacaatagcctgacaaatgcaacttaaggaaggaaggcttttattttaacttacaactttcaagaatatattccaaatggtagagaaaggatggaggagagagtcaacaagagcatgggagatggtcacaaggcatctgccaccagaaagcagggagacagatgctctctgtcttagttaggattgtattgctgtggagagacaccatgaccaagacaactcttataaaggcaaatgtcaagtcctgagtggtcatggaagtgacagtgtgacatggttccagcccctggagcagaatcagcagggtgtgggcctccacaagtgttgatggttgctatgtctgaggcttacttgtataataatgtacataattttccttgtgttcctccttcaggaaatagtctccctgctaaggttattgagcaatattctccctgccaaggttcttggggaacgccctctctgccaaggttaatgactccttgataatcagagacagcatgagtctagaaggtgaaggtatgtctatgtccttagccgaaatggtgaacactgtaacgtttgggacaacccttaaggctatgggaaagactgtgaaaatataagttcaaagaatatataatttttcaactctacaaaatatcaggatgcaaaacaaattgtatgagaaccttcatggacctaaaagaacagatacagctgcactataagccaatgcgttagaaagatattaaggaaggagataaagagatttggagagtagtgatggcagagcaggatcccacccggctaaatttattgtttgtgcttacaaaggcaagcagattcctgagttcaaagtcagcctgggagagaggtgtttaggcccaggtgtggtgggaatggcaatcgcagagtgagatcccacccagataacttaaggtctgtaagatctctgaattcatttgcaatgttaagaaaaaaataaaagaaaaaaagaatgtatttgctgtctttttctaagaatcagggtctgggttgaggggagaacgatttgtgtaataatcaaaggaaaatctatagtgaacaattgaattgatatgcaaattaaagactgggctttggtctgctagagctgagctatctggatgacactactcccaaacagtcctttcttaggtcccctgaccagagcaagactggtccttggcaggcaaacttttgattagggctggcttataggttcagaggttcagcccatcatcatcatggtgggaagcatggattcttgcaggcagacttggtgctggtggaaccaagagttcaatatcttgatctaaaggcaactagaagagactagcttttgtacagaacacagtttgagcatagaacctcaaagcccaccccacacagttacatactttctccacaaggtcacacctcctaatagtaccactccctatggccaagcatgcaaatacatgaatctatggagaccaaatctattcaaagcaccacactcttatttatgctttctctcttgttcctttttaatcagccctggaccctagtccatgagatggcaccatctacatttagggtaggtcttctctcctcagttaaaactctctggaaacttccctcgcagatacacccagatgtgtctcctagcccattccaaatccagtcaagttgaaaatgaaggtgataacatattataccttgtgaaaagaaacctagaaatccatggtgtcctactaagtagtggtgtgggtgttagcagtgtctaatcagaggaagctgtgggcccttaggggaggagtacttaaggtaaggtcttgacagtgggcagttccactttcccttccattccttgtgtaagcttggagtgcatgctcatgaaggtatctgtactgtatgcaggcattttctttattaaaagaaataggaaaatgaatgccgaggataccaaagatgaattttgctttttaattgctttgctatttcacccaaagtcaacttggcatttggtttagtattaaggttattgacttttgtcagaagtgttgttgttttttgtttgtttgtttgttttcctactgattgaatgaactatcaatctttgaggccactggaaaatcaataacttagaaatgaaacctgaagccattgtgatcatctaacttcagaataaatccccatcaaagctgaaagaaccttgacttggtttgatgtcttgaaatgttcaaagctttcttcagcttgttaaggcagagtgtggaactcaagttgcccaaacagccatccacttatcaaaggccagctggcaatttcttgtcatttgccgctcacttttatctgtaatgagggggaggagtgctgagaacatgaaagtatagcatcttagctgttgaatcctggctgctttgccttgatatccacagtgttgatgttcaaaatcgctgtcagctatgtgagtacaaggagaatcctttattctatatgtaggaattacttgaattagggaagattcaactgttgtgaaataaaacacttagcccttcctgcctctgactcagtccttataatactagagtgatgtcttcatacctcataccctgcaaaacacacacacacacacacatgctctaatacagttcaattgtgaggcccttatcatcaagagtttcttaataaaggggctatgaatgtgaattacccatgtgtgtataatatgcatacactaccttcgtaaaataatgaagagaataaacactaggtatacaaaaagacaaattttgctccgtgcaaaatcctcttttaagcatccagagcacccaaaaatcatcttgttcaaccatccattttatctttttcttggtaaacatatatgtgttacatgcttgatacacagtttttaatggaacaaaacacattttccttctttttcccagggcctccaatgactgcaagctaaagcaaggcacttgtgagattcctttaatgtttgcagggcccaacgcactgggagtgtcaggaccagttgctgttcaggcagactgccacactggtcttttgtgaaagctagagttccctttatatgaaggggtgtcatttaattagttaaatataggggcagatggagaaacaactgggaaccagtctcctactgccagtgatgtctttaccatgaaaaagataaaatggaaggttgaacgacatgatctcttggtgtcctggatgtttaaaagttcagtgactttccagttgcccttataatttgtaaactgtggattagggtatatcatctgctttaagtaaatgtagtggtcatggctgattgtgatcagtagtaaattgagactaatgaatagtggaggtctggaagtgtagcttagtggctggccactttcctaacacacacaagccttaagttctatacccagtgctccaaagtcagtcagtcagtcagtcaatcaattaaccaaccaaccatccaatcatccaaccaatcaatcaaagaacattgtattgtggataaataacttgtcctggggcagatgtagttcagtagactgctagttctcttccttcttgctatgagcgacagcttagattcggggctaatataaaattacaaatagtgggggaaaacagagtaaactttgtatatcataaacagtgtgcctcagtttccctcacaggcctctctctttcccatagatatgtactaattgtgttgtatttgatcccatgatctttctctgttattcacaagcatgcatgtacctattagtggctgaaaatatcacatagatctctgaatgaaatcttctgttttcaggcacattgccttcacagattaattctttttcatcagaacactgtaatggacttctttatggttgtacatttgtgcacatgtgcacatttgaaaaccctttcatggaaatatgtcttgaaatgggaatgtgaaagacgaggatattgtgtactttcaactgttatctaagctaactctgcagagtcgagtgtttaaggaatgttcatagcccagatccccatcgcctcctagtcagtctcctggactgttgccagactaatgtgaagaaggaaagtatgtatttggacgaattcgacttcgcctattgaagttttccttcctctgtttataacagtcctgctttctcagtgtttgcaatgagaagaaactacttgacagttactgactcctagatttaataatcttggcttccctgactttccccctcacattatttcaagattaactggagcacattacatttaccaccacccccccccccaaaaaagaaaaaactatgggaaatatagtgattcatgagttgggtgtccttagaacacaggtgcttttgcataattttaatttagcacaatatctcattattcccactaacttgcctattttgagtttaacggactcttttcctctctctatttttttaaagtgatttgttaaaattaaaggatctgtatttaattctgtaaacgcctctgtaagcatttcgtgcgactctcaacgtggttttgatatagtatacttttattttcattcagttcaagattaggattcttttcttgatttcttttttttaaaaacccatggtttatgcaaattagttttaaattccaaatattggaggatttatcagaggcctttttttttactggtttatgtttgattttgttatagtcctagaattcaggagtactgcagtccctgttgctccattgagacttgtttgaaattcagaatcttgtcttctgggtgaatgttctatgtgagctcaaataaaggctgacttctgctgagtctttgctagaatgctccataaatcttaagtcaatgaaattagtcattagtattcttcaaattttctacacacacactggtttcttaccacataactcaattcattaatgagaaaaagggttttaaaaatcactgtatagatgagaatttctcattttcatcctgtttgagtcatttccatctaatgcacagggtaattcttcagataaggttaggcagctgtgttcagagactccttcccagtaaggttaggcggagaaagagaacccccactgagaaagaatccaccatttcgtgtggagcttggagagccatgtggacatggtggacttcaaccgtaatagagctttccaacacagaaccaagaggactagtacaaggcatatatgtaatgaatgagtaaacataaatgcattcgacgaaaacgacttgactatgtttttaaaaccttgttagtttgctttgaaaagagctttaacactatatggactgagtgggttatatttaggaatatacatgaatataaataccatatatttatgtaataacatttaatgaaagagaaggtcatgatttgaaggagaatggaaaggcatacttgggaaagtttggagtgagagagggaaggtagaaatattataattataaactcaaaaataaatagaacttgtaaataacgaaaggcaacatgaatttttaaatttcatctttgtgttcatgggtgtaaattccttactgcttgttaaataatataaaggccttgttggaaatatttctaattctcaagtataatactctgtctccagtcagagatcttacgtatctatttcttacttgaggtaaagtgcataaacatatgactttcaaatattttgaatgttagcacaagtgtatgtatttcttggccaagaacgtaactcgtttgcacttatagaagcactttagtggaaagcttggctgattattgcaatgttcagtgtcttttcacatgctgagttcatcaatgaagtttaaattgtatgcatgtctactggttcttcttaaaactatttcctttgagtcagttcaataaaaacatgaaagtatgtttataccagtttctagaatgatctattcaggagttagaatgaaaagttctctttataacctgcagtttggtctcctgagacttttacacaatcatttgaataaaatctttcactttgatgagatagaaattaaatgaaatagtcttagtgtgaccttatgttattaaagtacagtgctccaaggactcattttgaaataagggtcagagtctggatgtctcttctttggtaaattaaaatgaaaatactagccgaactgctcgaacagaatttaataacatggaattaaattaatagaagttaatgaaaatgtgaaggtttattacatcaaagaacttccaataaaaaataaattagacagaattttcatttactgatttgccatgacattgagaagaaagagaaacaaatcaatattgttatagtttaggcatttagtattcactagggctcatttgtcagctcctactcagtacctgatatgatgtgttaacgatgctatctgcaggtttgttttttggattatgtttaattatattgcccaagtttagttccctacactgacgcttttaatgggtgaataagtttttattactttaaactcttctaaaagtgtttgttgtttatttctgtgcacaacttctagcagaagtgtaggaaattaatcccagcacatgagagcatgagaccaacggactatgaatttgaagccaatctaaactatacagtgatcaaagaccctaatggaagccctaaaactttaaaagtctgagaacaaaaaactaggggacatggctcaaaatacaagcatacaagaactttctgagtaggactccaatcattcaggaaataattgtaataactgacatgtcagctcacatgaagttagaaagccttgacaaagcatcagaaatgacccctaaaacaggtgacaaacccttgccagctattcggacacaggattcgtatatagaatacataaagagctcaaaaacttaaacaagtgaaatcaaaatagtctagttcctatattggcaactaagctgagtgcacagtttccagaagcagtagtacagaaacggggacccaactcagtcagtagattgcctacaagcgcctgagtttggtctccataatttctagttaaaaagctgggtgtggaggtgcacacttgtaatcccatcactggggaggcagagacatgcagactgctggagctcgctggcccaacagactaatctatttaatgactcccaagacttgtttccaaaaaaaaattttttttttttttttttttttttttggtttttcaagacagggtttctctgtatagccctggctgtcctggaactcactttgtagaccaggctggcctcgaactcagaaatccgcctgcctctgcctcccgagtgctgggattaaaggcgtgcgccaccatgcccggcttcaaaattttttttaaaagacagtacctaaacaatgacacccaaagctgcaaggctgtcctttgatctccacatgtttgcatacatacataaacatgcacctgcataaaacatatacatgcaaacagccaataaatacatagaaaatgttcactattgtcagtcaccagtgcaaattagaatgaaactgagattctggagagatcattcagtgttgagaaacactggctgctctttgagaggactcaagtttacttcttagcacccacatcaggtggctcacaattgtgtaactatagctttgggagatctgatacctctaacctctttggactcctgcactcaagttcacatgtacacatgtgaacacatatatctatactcgattaaaaataataataaaaaactttaaaaaacaaaattgagattcagccttactccaggtataatcgttatcaccagggggtgtggggcactggtcaggatgctgaggaaaagggcaaccattatatatgacactgttaagaacctgtctggtcactttagaaatcaatgtggagggtcctgaaaaacctattgtctagctataccacttttgtatacctagtcagagattcctgcacatgcgctcattactgcagtactcacaatagaaaaacaaattcatgttgtttgcaggaaagtgtatagaactcaggattatcatgctgagtgagataagccagcctcacaaagacaaacactgcatgttttcagggagggaaagagggaagaaagaaacagagagactgaacgccaagtgtggttgcacattcctattatctaactatttgcatggtgaggcagaggaatcatgaatttaaggccagactgggtagcagagtgagatcttgtcctagaaacaaaaccaattaccaccagtaacatttattttacttaatactggccccacagtttcagagtaatcatgttttgagctattgctattgatctcttactgtgtctaatttataaataaagtttaccataggggtatgtccagccaaaaacatagcgtgctcagtctttactatccaagacatgggcaccaatggggactcctgaaatatgtcctttcagcacagaggactgtgaggtcagggcagcttgtgggaccaacagcatcaacatcttttgggaacacactacaaatgcatatccttggggcactaccctggacggactaaatcagaaacactacaattggagcccagatatatctattattataagccctccaggtaaatacattaatacattttgacgtttagaaataatgttcttttaatattttgagttctgaaactggactagaataattgcttaaaaattgtagcctggcatactgacacagacctgtaaccctgtctatttcagagggtgagacaggagaatgacaagttcaagacctacctgtgctacagaggtgccttaagtgaaaccctgtttctttttttattactattagatattttcttcatttacatttcaaatgctatcctgaaagtcccatatacccttcccccgcccccaccctgttccccaacccaccctgttccccaacccatccactcctgcctcctggccccggcattcccctgtactggggcatatgatctttgcaagaccaagggcctctcctgccattgatggcctgctaggccatcctctgctacatatgcagctagagacacaagctctaggggagtactggttagttcatattgttgttccacctatagggttacagaccccttcagctccttgggtactttctctagctcctccattgagggccctgtgttccatccaacagatgactgtgagcatccacttctgtatttgccaggcactggcatagcctcacaggagacagctatatcagggtcccttcagcaaaattgtgctggcatgtgcaatagtgtctggctttggtggttgtttatgggatggatccccaggtggggcagtctctagatggtccttccttcctgcccgaggtccctgacgtttctcccttctccctttccagtctcagcagaagtgcatcgtgatcttcgctctggtctgctgcttcgccgttctggtcgctctcatcttttcagcggtggacatcatgggagaggatgaggatggactctcagagaagaattgccaaaataaatgtcggtaagaggtaacaaacaaaaattctcttttagggggtggtgaggaattcagggacgggcctggacagggaagagagagatgtctgctcagatctgctttcagcaggacttaaccgaggccttgctctctgcagagatgctggtgttcaggtcaggccctaggcatgattaatgatttcattcactctacaacccagccctattctacaaaaagagctggttaaccaaataaaatatgtgtctgcatttctggagacttctgcgtatgacattttgatccactccctaataaagcctggaaaagggaagtgcccccgtggacagagaacacagttctatttctttatgcagaagaagttaactcatgcatctcagggttggctgcaccttagcaagtacttgtttatttgcttattcattttaatctagatggaacaccagctttattagtcacttcttatcacaggctatcttgagatttcagtaactcagatatgcctggggacacataagagttattacccattggcatatctgcaaatacactgtgctgttcacatggtgatgaaatcaattaaagatatgtttctcagagcaagtctttttgcatatacatgactgtgttgtgtgacttcagtcgtattatgtagcgcctccctgggattcttccctatctgtagaattgttgtggcataaattcagcacaagaggtttcctcttccactcttccctgagttgtgacattttatattctttatgtattatgtatgtatgtatgtatgtatgtatgtatgtatctgtatgtgtttgtaaacatatggacacatgagccagagctttctttcaagtggaggtcagagaacaatccatgaaagttgatattttccttccagggtgtggtggtttgaatatgtttggcccatgggaagtaaaactattaggaagtgtggctttgttggaataagtgtggccttgttggaggaagtgtgtcactatgaaggcaggctttgaaggctcctagtacccaaattccacctagtgtagaggagagagcttcctcttagctgccttcagatcaagctgtagacctctcagctcttccaacaacatgtctgcctggatgctccatgcttcctgccatgataataatggactctgaaactgtaagccagccccagttaatgtttgtcttataagagttgccttggtcatggtgtctcttcatagcagtggaaaccctaactacctaactaagacacagggattaaactcaggttgtgaggctctgtagcaaacccctttactcactgagccattttcctggccctgactttttttcatttttgaggttgggggctgaggtagaaagaaatgtaccaagaagaggctgttgtcaatgtcaagctagaaaatatgggagctcattcagatgtaaactacaactgacattcctgctcagctctactccacaattgctatctgaactttgtgaccccagttcagctctacagtggcatctacataaaaagagaccctattgcagaagcctgataatgggtacacaacattttaccctggatattttgccttgaatttgaatgttctagcaaaagggggggggtactctttcccctccttcatccattgctctgcattcctccaggcactgatgccactagtaaaaatgaccaagcttttccaacagagctgaagttcccgagactgatgctccacccccagcagtggggaaggttcaggtcagtaggtgctccccagaaggctggcctcagcctccctatcccgacctgcaggacctagttatctgtggaattgagggggaccaagcctgaaaaagaaatgagccagaaaagggagcgacaccaagcaaagagttgttaaggtctgtttaatggaggctaggagcctgattataagcacacaatgagagaaaatagggaggggctgagggggcataatcaaagcacagagagagggatggacatctggggcagatgctgattgcaggcttcaaacatcttgcagcgtatcttggaatgctggctctatctaaacagtcccaggcgccaagtggagacaagaagcagggggtgacactgttcccatcaaagggtcagtcagatcttcagggtgagagttgttgaaggtctggtttcccacagtttggtctctcacacctccccttctgtacatcatccccttctccctctcactgcctactgcttctgctcttctcagaccttatggtggcacacagtggatcgactgacattactctccaatggctgagatcccacagaggtacatacagtttctctgtaggcttccctgcccttggtggtgttacaaaaaacagtaccatgtgcttagtgcaacctgtgctgtgatttttgacttagaaattcaagtctgcctgtatttgtctcccgactctctcctctgtgttttgatagcctctccccaagtcctttttcacaccgcgttcttttccaagtatctccctgtaattcatctcgttccactcactagcccatctattctgtgatggacctctgggctgaatcacagtgtgcagtcagctgtcccaatgtttatgcttttattaatgtgtctcgccatggtcttttctgtctgctttgctctatttctttgtcccacatgttactttttttttgccacatgactgcactaataggagataatcatacatccacctatcatagattacaaaatgcaaattgttccaaaacgttgttccccataccttttatttaagtttaaaaatgggaacttgctgcagttcccaggctgcgtattcttgcgattggcctggcatttctctgctgtctttctttttttttgttgtttttttttttttgttttgttttgttttgttttaagttttaaatattttattcaacttcaacctaactaaataagaaaaacaagataattttaaatccaggataaacaaatccaatcagcaaggagaaaattcannnnnnnnnnnnnnnnnnnncaaatccgatcagcaagggagaaaattcataagatgtgaagtacaaaccaatacaatgataaccgtttctttgattaagctggggaatgcctagtttgctatagtttttaaattttattttgacttttaaattctgtgtatatgtgtgtgtgtgtatgtgggttgtatgcatgaggtactgttgtaaaccaggagaggttgccaggtcctttggagttggagttacaacctaacgtgggtgctggagactgacctcaggtcctttgcaagctctgctgtctttctaagactgtgttgcaaggacacctgccttcttgtcatctcaagactcctggtccagagctacaacccactttgagtctttatagttttcctacttcctacatgtacgtgaccggatcttttgtgacacctttgggttctgttggtgccatcttccatagctcaacactgagcttttaaatagacaataattttcatgtgatccaagtctaaattactgagattagactgttcactggggtgaaaatgtgtgacatttcttatatttccgtagtggaactttctgtggggtaacagctggggattatgagagcaaagcctgatgtgtagatgatacaacttgaaactatgatgaaaagacacaattctgatcatctgcttctcaatagcagagatatggaaaaaaaagtagctttacagctttgcctttggatgataactgtccccattcccctatgaggataatctttgatatagtttttcaaaggaaggcacatgaaccccagacaggtgggtgcctaggctgtcaatgatgtagaaaacagctcttgtggaatgtggctgtgcctcatttacacgggcccgtgacagtaggatccagtacatctcaggaagatttaattgaccagagttctgtggcaaaagcaccctgtgcctggctgttgtgaccggtgtgcatgacaagttcctcccctacgggcaaccttcttcattaacctgggatcaggacgaggaggtgtcaggaaggagaggggtttgtgaatcactagctaacctcgggatgcagtggatgagagctaatccttaagaggcagagagagcaggagcagaaagagactgctctactaaagtgaaattgaataatttacgagtatgatttttttttctaactggcattgagtaaataactttcaacaacaattagaagcagaagataaaagcttaattctgagtgaaggcaaagagaatcctctaaacatatgttagtgcagacatttttagctctaaacttgactttcaaacataatggcacatattaacattttatttcactattgagtccaatcagattcatattccctacattataagagatttttattagtaatcatactcagaaaattatgtttatataacccctagctaaaaaatatctgagattattttttgaagtaattccttatctttaacatgtagtgctttaaaagaggaaatctgggtaaacatgacacttcctagtggtctgtaattaccactcggggaagcagcagaagctaattatttcaaagttttgattttaatgaaacttaatgtacaactaatgatgctgacatttcctgttgccggtttggttctctaggaagattattgaatgtggtgtacatttctcaaaaagttgactgaacgcttataggcagagccatacctgatgatcatgatgaatggcaagaaaggttgtcagtgatggacagcaaggatcaaatctctgtgaagccatttagaatctgccaaggagaacccacatttaaccagaggcaacagaaacattgacagaaaacatgactgttgctgtcatgcgtcccggtagaggtcaaaggcatacatgcatcacagtgaaggtcagagcggcaacttgtaggagccaattctctctccaacatatgggtcccagggttcaaactcaggtttcccgccttggcttgaagtgcccttaccagcagagcaatctcaccagccctttactgcacctcttgagtccaaaatttgtttgtagtattggtttagaccattggttctcaaccttcctaatgttgcctttaatgcagttgtggtgatccccaaaccatgaaattgttccattgttacttcataactgtaattctgctactgctataaaccttaatgtaattacctgatattcagaatatgtgatatgtaaccccaaaagggttccaacccacaggttgagaaccactagtttagattattcttctacaggaagttaattctctcggaagccacgggaatccctctgcttcactacatacagggctctgctcacatcctgccatccgatccatttctggatgttcccatctttgccaatgtccacccacagctgtgatcgctgcatatggctccatgagccacaaacgccagatctccgtatctgtctgtgcatcactcacttggctgaattcagcctttgtgcctgtctccacctcacaggcctcataggagacagccttgttttaagttcgggctaccctgcttctggaggctttcacgctgcccagagctaacctctgccagaacgcccttgcaactgacaaacgttagttatgggtttttattcccagtcatttaactcgtcccatcctcacagtagtcttgtgctgtcaaataagtatattgaggtccatgaaaatttccattaggaatctggatgaggcagatttggccatgcatggcagtaattccgacactggagaggctaaagcatgggttccagaacagcatgagctgcagagcaagacccttcctcagggagagagagagaaaacttagaagaaggagggaaaaggagaaagagacaaaacaaagaacaagaacaataaaccaataaatgtttccagcgtagcccacagcattaacagaactgctggatgtagggagtcttgagtctggttgtcaccctttgttctattgtttattttgtttgttattagaacaagcaagcaaacaaactatagaagcgtggctaagaggggaaactttcctccccagtttgaacacatcaggagtattacacattgaacgttctagaactcccaaaacattcaaatcgatgccttttgatctctcaaaatgctcttagatgagtattgagtttagatctcgctttgctgtaagtgaaagttgaatcaaggatgttttaacttaaaggaggtagcatcagcctagcctgaaaatgtgatattacagattgattatattgctttgtacctacccgaactcctttcagttttagacattgataattacacccaagctgagattagatccccaggacccaaataaaagtcactggagcagtgtgcacctgtaactccatcaccaggagacaggaggatcccagaggttcatgaaccaggtggtctagaaagaaagataggtttgccaggcatggtggcgcacgcctttaatcccggcacttgggaggcagaggcaggtggatttctgagtttgaggccagcctggtctacagagtgagttccaggacagccagggttacacagagaaaccctgtctcaaaaaccaaaagagaaagaaagaaagaaagaaagaaagaaagaaagaaagaaagaaannnnnnnnnnnnnnnnnnnnnnnnnnnnnnnnnnnnnnnnnnnnnnnnnnnnnnnnnnnnnnnnnnnnnnnnnnnnnnnnnnnnnnnnnnnnnnnnnnnnnnnnnnnnnnnnnnnnnnnnnnnnnnnnnnnnnnnnnnnnnnnnnnnnnnnnnnnnnnnnnnnnnnnnnnnnnnnnnnnnnnnnnnnnnnnnnnnnnnnnnnnnnnnnnnnnnnnnnnnnnnnnnnnnnnnnnnnnnnnnnnnnnnnnnnnnnnnnnnnnnnnnnnnnnnnnnnnnnnnnnnnnnnnnnnnnnnnnnnnnnnnnnnnnnnnnnnnnnnnnnnnnnnnnnnnnnnnnnnnnnnnnnnnnnnnnnnnnnnnnnnnnnnnnnnnnnnnnnnnnnnnnnnnnnnnnnnnnnnnnnnnnnnnnnnnnnnnnnnnnnnnnnnnnnnnnnnnnnnnnnnnnnnnnnnnnnnnnnnnnnnnnnnnnnnnnnnnnnnnnnnnnnnnnnnnnnnnnnnnnnnnnnnnnnnnnnnnnnnnnnnnnnnnnnnnnncctcctgcttttcctcctccctccctccctttcttttcttcttctggcatttgtctgacagatgagactagacaagtctccttgtatatacgtttaatctccctttatctgattgaccttttggtcactgttacagcttggcaaataatggagaagagacatttgtctttgtaaacattatcatccaatttgcatttcttgttggatcccagggatgcttgccatgtcaagaagcacaccctctttgtcactgcaagcccttgagagaatgcatcctcattgctgcatcctaggctgtctgctcttctccactgcatgtttgctggaattggaaatgcttatcttattgatatttgagtttctggcgactggcgcactgccagaatgtttgaagttcctaaatgctgaggacagaagggatgaaggaatccaaccctgacataatatgtctcctaatatcacccacgaagagtgggcagtcaaatcaattataaactaggctatggaggagaagagcaagatgatatgaaaaggaagagaaaccaggtcaggggaagcaaaactcacatatccactgaactagttaagcaaccctcttctggtttccaatttttctatctgttaaaagaaaaaaaaaaaggcaaccatctaagatgacctattagtttataaaatacccaaaaactgagagagctgataacatgattcattaacacatctgcaaaatgcctaaacatagctacagactttttaagcttttgggattatctgtcaaagtttaattgatgaatgggctgggttttctatcaagttgctgtgttgtggaggggctatgttaaatctaaagctccaaagagaaatgattagtcactatcattaagaatatctgagatggatgagttcagacacacattcatcactcatcactgtgtaagagttttaaactgaaggatgactactgtcaaggagtcacagaaaggagccgatgactaggaaacagccaagctggccactgcatcgaaacactattagcaaagacttgagatgcaagctcagcctaaggacaacaggctctgggctctgtgctggagcacagaatgcaagcaagaaacaacggaagaaggaatagactataatcactacactacactgggacacgtgtaccaggcttagaaacctgggctacattttgaaattccctgggagcccactacatagttaagactccggggactggagagttgagtctgtggttaagaggacttgttcatcttagagagtgctcagatttgttccccgccatgcacatgctgactcataaccccctatagccccagatgcaggaaatccaatgcctccttctgacctctattgaggacaggtacacatgtggtacacctacatacatgtaaacaaaacagctacacgcatacaataaatcttttttaaaaacctttgaaaagaatgtgggcatgattctatttgcatttcaggaacatggtgatctgctcatggtttgtggaccaaccagttatttctcaaacacattcttatatgtcggccttagaatcatgtagttgtatacaaacacccattactgggtttgacaaaccataaataatcagacatcccacgagttcaacttagaaatcttcattaatgaaagacaacttgctgttggcagcttacagcatgggaagttctgggtgacttgatggaaagttggtgccaacaatctcaagagactttgaagctaggtaaacactgagtctcaactctgtctgatattggtctcatttttaaccaattcactcttgtctctgaggctgttcttggctctcagtagatgagcttgacagtgcctgctttgtagggttgcacttagagttagttaggatagtagatttaagacaaccaacagtatgtaccatgtgaaatctcacaattaagtactcatacgacatgcaagaaactcccagataattctagttactaaccaagaatcacgcaaaatagtatctagctcctgctagctatagtttggatcttacatggtccttaaagatctgtgcttttcaggcttagtctccagtccaggacactataccactgggagatggtagaagcctcaagagctggagcctcatggaaggaagttggtcattagatgacatgcccttagagtggagtgagatcccagacctttcctgctttctctttgtttttctacctgccaggaggtgaacaggttcctctggtacatgtcaaatgttctctccatagtgcatctctctgtttcgtgtccaaagtagcagggctaagtagccatggatgaaaagctgtgaaaccaaaataattcttttctttgtaaagtgactggtctcaggttgattgttacagcagtagaaagctagcgaatgtcgctctttcttgtgaaagagcgtagccgtgaaaaaataggaagtcaaaagtagaaagttgtccttgtttttgagacaaagtctcatgtgctctagtctgcctgcaaactccctagttttcccaaactgaccttggactcccataccttctgcttccaccgtattcattctggaactacaagagtgtgccatgcatagatgactgttcagtttttaactgtgtcagaagtggacaggaagttcatttctgtctggatgtggtactgtatcctgttagctacttggaaagatgagggtgcagctcagtttggagaatgcttgccccacactcacagggatctgggttccagccatgcaatcactgtcttctatgtggagatgcccagagctaatgcaaaaatgtaaacaaaaaaactggtggacaaagtcctggggaggtgctcaagtgtgagatgtcactgtggtaacacaaaggggtgtggtgtcccaggattctgatgaagagtacaaaaggagatcatgactacctccatgtcaacaccacattttacagtttttcagggaaataaatgtagcaaagaaaattgaaaacaaatgcaaagggtaagagaagtagagaaatacactaaaagatgctgcaaaatgccacaggaagccaagcaagacagaagtactttaaagcagaaatcctgttctgccctttttgagcgtggtagctggttacatggtattaattctggacaaacatggcatcttttggctttatattcttgccagcaacatctaataaaaccaaagggagaaacttgtttgtgtgctactctttgagtggagagaatatttctgaagatctgttggtctctaaaatgatcttatatgaatagctgacatgagggataatcttggaaaggctatgtcttctggaaaaatcacgatgccttttagttaagaactcacatctcctcctaatggattcctctctagttagttatccaataactgttttgtccaattatatctccatttttccatccaaaaatgtaattatttatgcatgcatatatgctgaaggtagaacttggggccttagacatgctaagcatgttactgtaaagagagccacactcctaaccccctaagaaagatccgaacttgaaggaaagacttcctctttcccccacagaatgaacatttggggatgacggaattcacatcatgaaaatacatactccaaatgcaatggatgccacaagccagctcaattcaattataaaacatgttaaaatttatcaatatgtatactagagattcttgtttgtttcccacccatgggacttgaactcagggccttctgcattataggcaagtgtcctacgactgagctacagccctagtcctaatgatggtgcttcttctgccccttcttcttaatttgaactgtgtagtttcattgcaatatttcaaagaagtcagaagattttagatttctttccccttcttagtactaagagttgaactcagagcttcacatatgctagacaaacactttaccaaggggaattatcctcagccttgaagtttccagtttaagttttactattctttataagtatcatttaaaactgttagcaaatcttgaggggtggttcagcatattaaacactggtctagtgctcatacccaaggctgcagcttgctgtatttacagtgtggatttaaatttgtcaacagactgcttgattcactcatttcttcaaaatcaattatattaaatgagccaaatgtagtcatagcagtaacattttttcataaaagatagaaaaagatctcgaacaactcccccgctccgcaactcaaatttcaagcagagaaaggatacagtgtttacctttgtttttttcttttctgaagccaggaatagaaatggtaaaggttccagggagttttttaccatggccattgtgttagggtttatattgctgtgtagagacatgtaatggtggcacacgggcagacaagggactggagatccaaaggcagcaataagaaagagagagagagagagagagagagagagagagagagagagactgggcttggcttaaactcctaaaacctcacagcccaaccccaatgacacacttcctccaacaagaccacatctacaccaacaatgccacacctcctaacactgctactccctaagagcctatgggagccgttttcattcaatccaccatagtcatatgcaagaaaagttaaataaattgtgtcttctcatgctttcactaggcttggagaagccacatgatatatccacacacaaacagattccctagctggaaatccaggcctgttgcccaggagcccagaatcagcatgtgtccctactcaaagcaagtataaccaaagcaatatcattatttatcatttgtttaaaaatagcagctaggtttgacccccagagtcctgaaaatctttctgcactctaccagcttcctggaaaaaactcacagtaagcagattcacaggaggagatgccctaacaagtgtactgacttggagaaacagaaagtcacacaaagtatgagacaccaggaagccagagtgatgagagcttagacctcaactcataggagggaagacagtggagttggatgttcagggcaattttagatgggtagtcaatggttattagagaggggggatggactggggaggcagaaaggaatgtgatcctatgggatttgcatgaggcaatggacatgtccagacatggttacagtcttgtcttgttgatagtcctctttggtgggtcaactgagttcaggagagagcctctccctgtgcattcatggctgggagagagacaaggcaaggttagagggaaggttcttgattgcacagcagcttctaggctgtcttgtcatcatgccaatctatgggatttttggtctttgagccccaacagaagcacaatttttaacaagtagaagaaggacaatgtgggtgctttaacttctaatcagccatgctgcctaactatgatacagtaaaatatagctgtctcttgtgaaactatgctggggcctagcaaacacagaagtggatgctcacagtcagctattggatggattacagggcccccaatggaggagctagagaaagtaaccaaggagctgaaggggtctgcaaccctataggtggaacaacaatatgaactacccagtaccccccagagctcatgtctctagctacatacgtatcagaagatggcctagtcggccatcagtagaaggagaggcccattggtcatgcaaactttatctgcctcagtacaggggaatgccagggccaaaaagtgggagtgggtgggggagcaggtgggggacttttgggatagcattggaaatgtaaatgaaataaatacctaatttaaaaaaaaacaaaattaaaaaaaaattctatctttttgaagttcttagctcttgccataactttgaaatgaccctccaatgtgcgtgcactaggtcagaaacatactcggacatgcttgtgtatttcacccgtgtccatacttattaagcaacaataagctacattggatttgttggccacaatttggtaagtcttccagatttcccttgatagcttggtgggacaaacacaaattctcttatctaagtcttattttctctctgaccacacatgaaatatctatcatacagtaatttctctgtctatatgacgtgtctatgttacagatggttataaggagtaaagtaggctgcagcaaagctcaatatgagaaaaagtataagagagagagagagagagagagagagagagaggagcacttcctcagaagcagaggaggatagtacagaagcaaaggaagtctccgtaggaattagataagaaatctttttggaagtctgctggaggcacaactgaagagtcacaccaagccttgggttgagttgggctatctaggggagctacaggaccatggtagccaaagaagcaaaggggaggactgagctgaagactgtggaacaggtagagcactcctgggtccttttatgtatacactgggtggtcagatggcaggccagtgatgtcagtcacccccacagtgattgctgtcctctttatggaagaaaggtgaggttattgcacattttcttcggtctagtgtgttcagtaggtcttcagacctggttttctagatatgattttaatatgtcaatgtgctcacatggcacagtttcactgtggtaaactgataggatggcaccctttttccatttagtaacaaattaccaggctttgcctaatggatggtgcaggacagatggtgttatttgtgtgctcactgaggtgtagtcattctgcctgtatttatactcaagtggagctaaatgctgcaaatagagttgcccagggcaaggcatagccagaaaacaccctgttttatacaatatcaactaacttagagcaggctgcagccttatctcagcattctaaatagttaaggagagctttacgatttcaaggaaaggccacacctcctgagagatcctgcatgggtgtgtctctgtcactcttgttactccagatgacaaagacttcaggctccaggcatgatggagtgtgttagctgtataacaaatactgaaatcaaagaaagaccagcaccatttcttttgagtatgtaagaattaaggtgtatatgagtgtgtgagtatgtgtatgtgtaagtgtgtgtgtgtgtgtgtgttcactcttcaattgcttttccacttatggtctttgcgatagcatctctcttgaatccagaactcactgctttggctagacttcctggccagcaagccacaggagctcttctctctgtgccttcctggtgttggggctgtaggcacactgatgccttctctctctgtgccttcctggtgttggggctgtaggcacactgatgccttcttctctctgtgccttcccagtgttggggctgtaggcacactgatgccttcttctctctctgtgccttcccagtgttggggctgtaggcacactgatgccttctctctctctgccttcctggtgttggggttatcggcacactgatgccttcccgggttcttgtgtgaatgctagggatcctactctggtctgcatgcttgcacaggctgtactctgttgagcaagccatttccctggtcctgatgtttttaaaagcacctgtagactcaaaattttaatccatggcatcagccatccatcacttggaccttaactttcctctcatagctggttgcagggtaaagagggtgtgcaaagaacctgcaacagcctggagaccaaccatctagactctagaccctctggttatttttgtggaggatgttctagaggcatggcatttttaaaaaaaaacctttatgctcaatgaacattttatctatgcaagtatgtacccaacagactgcttacctgtgtttagcaaagaataattgaaaccatttctgcttagcacgcagattatctttgtcagtgaaatgcggttctgccttggatcgctataatgaacccagcctgacttatctagatttattctcctttcgtgggttggaactcaatactccttttatattttaggcattcccatttgcctaaaaatagtcccaagggctacctctctgagtgcagctacaacagattgccttgtcgtgaagcagagggtgaaacccgttttctgtctctctcactcaaaattttgctttccatttgatgcactcgatgaagataatgatctcagaatctggctgtggagacccgactctctgggtacatgcattctcttcctttaaaaggagaatgcttctccaggatccagcctggagcacactccattagttaactttatttcttttctccttgagttgtctatggcttcctcctcccttgaaataatcacctactgaccatctgaccaacctctgatcctagacacttagttcattaaaatagttcagggctagaagaggtcatcttgttaaaatgacttttttttttcttctgctgttacactggaagcaaaactaaatgttgtgatgtattgtcctagtgggtgagggctttcacatttacatgtagaattctaaaccgggcagcatcatagagaactcgagaaaagctgcaggcattgctagcaaggggctgccagaaatctgctctgtttccctactatcagaataacccctgatagaaataagagctgtagaaagctgaacataaacgtaagtgtggtgttctctcccagtctcagctgttgacagactggaaagtgactatctgatgtctcctttggaaatgacattagttcactaacttcaaaggagggaggggaagataaccaaagagaattagccagcccagttgctgcaaaccacatgcaggtcctttgactcttagagtaagagcccataagatcaacagccaaccaactaaagctttctccctgccttgtgttttggaatctgcttttatctgctttgtttttaactgaacaagccattttttacttttttcaaaaaaaaaaaattcgataatagaaatagcaggcttcaagttggctcatttcacataggttcctgctgccaagccttataaattgagtttgatgtgtgtgagcagacatgaactaaatacaatgaaaattaaaaatagatatatcaatatactgtaacattaccaaagcttttgtcaccctgtgattttattaatgacaaacaagcctgaactttgtctggtggaaaagaggggaccagggagaaggcacacaagacagataacatagcactatcctggggaccttagactctagaggggaaaaccaagaataacccagaagagatcagcaggtagaaaggcagacacagggatggatgggtaaatagtgctggagagtagagatgcagtagaaagaaggaagtgcctgcatggggaacacaggatgggagggtgcactattttgtacataattttgtttttaccagtgattttagaaacctcagtataaagttatttgctctctttattcagcagagagtatttgcccattcacttacaggaggcactttggtattggctgatataggactcagaggcactattggggtggtcccaggctcctatgtctctgtacaagaactgagcagagacccatttgcaatagaagcacaagtagtttattaactgacagaacatttctgaggctggaaagatggcccagtcagtaaagtgcttgctgtgcaaccctgacttcaaaccctagaacccacgtaaaaagccgggcacgttggtatacacctattattgcaacactggagaggcagagagagtctagaggattcctagagcttgctggccagccattgaacaaatttagcaaggtccaggctcagtgagagagtctgcctcaaaaattgagataaagaatgatggagaaagatcaacctctgacctctaacctgcacatatgcacacaaatatgtgcatatgcaacaaagaaaacaggaaagggggaatttaaaaagaaagaggtagctcatgtacaagagaaaggatctgagaaaatggcttaagaactcaaaatggattggctaaaaaggatgggaaatttatgtcctaaggaaggccttggggtcatttgcataatgcttgctttcagattctctgctgcatgcaattctgtatccaactccatgcttacaggtctggttagcatcttgcctctccacctggagagtttgcataaaacatcccggatctccctctctgtctcattcccctgcctcaagtttattgctttctttcttacatatctggtttgcaagtgtggttcatctcaaatattggagcccttgttcgggaaagcaggggttacaagaacacaaacctgtggagcctctaatgtcctgaccatctcatagctaggagggctgctggtacacacaacctagagagctgaacaaaaatctcattcacatcttcctgggacacagtggtgtcacattaaagtttgccctgctattcagaacagcctttaatgtacattttatgtacattatacacattatacatgaatagtttcagaccacaattgactgagtctgtagacagtgaggccacgtatagggaaagacagttactctactcagttcatcctcagagttggagggcactggatgcagacatgaaggagatggatatcagggaaagggtgaacctatcggtcttgaccccttttagattcaaatgacccttttacaatggttgcctaagaccatcaaggaaacacatgttcatattagagttcataacatagcaaaattatagatataaagtagcaatggaaataattcttatggttgggagtcaccacaacctaaggaactgtattagagggttgcagcattaggaaggtcgagaaccactgcctctattgcatagtgtctggtatagaaccatggctgtagaccgtgggagcactgctttcaaggagccattatcaactagagaactataagactttcttgaagtaacttagggactgtcctaggagctgcgttcagagacttgtgttgttgtgaccagatacctaagaaatacaacttagaggatgaaaggtaaacatgtttgatagcaaatgcctgtgatcccaggaccttgtaggctatggcaagagaattgctatgagtcccaggccacgttgttctccctacctccaaccattaaaggaaattatttattttgtttcaaagattcataacttacagctacttggggcggggggtgagaatgtgcactttcgtaatgtcccctttggggacattatcccaatggccttatttcctgccaatagtagtaggccctatctctaaaagttccactaattctcaataggaacaggctagggaccaacatgtttcacacacaggcccttgagggacatgtaagatatgaatgaccgctgtggtccttggtgtctttgtgacactgacatctgtcttaagaacacccactcacaccattttgcattgcccaccactgtccctgacactttgatgaacaaaccatttttcaggttattaaacccatcaaggttttatagtgaaaaggaaattgtaaatgactgcttatggcctgctttactttattctgctctatgtcatttaaaatattagtcagtttaagcacctcttccaaggggatctttttctcggctctttgggaaatgattctcagctgtgtcttaaaaccacaagagctttaaagcacgctactataccgctgtcctgaaggtacagctgggggatctttcttctaagtttccctgaaggttccaccaagatgaaaactcctacccaagtgactgcactgaacatggccggtaacttcctgtaggcgggtgccaataaggtttttgatctgttggtatgttggcatctgctttttcaatttctatgactctaaaggccagaccttaaaacagcctatcctatcttctcatcttaacttatgacttgttcacacaccctagaaccaaaaccagagctggcatgtgatccagcttctgtctgcttgtgacatccattccagctgcttgtgttttggacagctctccagatatagatctagggactctgaaagtggaacaactctttttgtgggccaactcccaaggctcccgctcagctctgcctggtcactctactcctgtttctatgagagctgactgtgttctgccattttctttagaaggcctgtaaggaaatgtaggtttaaaatgtggctagaccaggtgtctccaagtaacgtttgacaaccatactccatatttcactgtgcagtgtggtctcgccattgacttcattggcactggaaaataatcaccaactatgtaaataccacaaattaatgcaatgttaactatgggattgcctttgcaataaacatctatatatgtcagcatgtgaaagaacatatacaatccttccatcagtaggtatacaagttcttatgtgcatgcaagtatatggatcagtgcacatatgcattattattacaaatacaatttgcctgaaagccagctgccatatcgtcagaaggctatttttatcctggaattgttttgccattgaggtgaagaatgtgagatcgatgctttattgataacattcccagtgaagttgtgggattttccccccttctgcaaaataaaaggtaaacagttcagtcttatttagcgttacttttcttagtcttactggttcatcattttaaaacaaaaccaatggagattggatatagggctccagtctccagagggtttcttgaatttgttcctgcctctgcatggcttacagtgtcagcccttcagccgcaccctcagctcatcaaggttttcaccaccctttgatttcctttcatttcctaaatgccctatttttctcaaattccacatttaaaaacaaaatccgtggttgagagtataactcagtgtgatttagtgcgtgcttagcatgcccagcccaaagtatgatcctcagaaccttttagaaatgtgttgatttacaggtgaggttaacgttttcctgaggcaggctgcttgagaattcacaacacaccaagtagttccatgcagcccaagacgcaaagtagtaaactgtgtgaccttgcagagtgtagggtcttctgtgagggaagaggtggactcccaccccaaccccacgagcttacctgaggattggcagaaagatggccaggtcctggcagcacatagcagggagggcagcagataaagatagtaaacccacctcccctaccacaaagggaatagataatggcctctcagggtcccagggccttcaaaggttggtatgctctgccaaccaccttgcttgcctagagagcttacactgctccttcttaactctttctttcacagccccaggacacatcgttctgtctattccagaatgttccaacagcctcatttcacagctctctccttcaagtagcagattaaaatccctattataaggaaaaccttttgtttgtttgacatggggactcacgtgatccagggtgacttggagttcactacagatctgatgctaagcttgaaaccctttccttccctctgcaaccttccaagttactggggtcgcagatgtaggctgccatgcctgacttaagtaaagtgtttgtatacctcctggaccaggtatacagaccttgttctcttcagccataggactcagaagcactgactgagagtgaaattcactgaccctccatccaaagagcagcaaggagacatcctggccgagctggcagacttgtgccctccaccaagtatttctttgggacttttcttagaaatctcatgattgccctggaatagagaatagctttattttgaacacagaacactgccaagtttttttttctttctttaatgaggttctgagctatgaatctatttcttctttaactaccttctgacctagttcataagattatcctctgaagcagagcttaacacagaatctagttacgctgcttcatgaagtcgaaaaaaacgaatgggataaagtcttaaaggaaaagtgttgttcattctgagatgaggccgccggctttggtctgagctcctctttatgattgtccaaatcagagtaggaaggaggacggatttaatgtttttctaagaaaacgaacttgacaaactcctgagtattctcaactatatgttcatttataaaggtaattcatagtttttgtgttaattattaaataattaataaccttacatttgtacgttccctaattggtaaagatggtagccagaaatgaagctaaccatagctgaaaaggtgtttcaaggtcatcttgtccccagattgcattattccaaagtgattgtcaccttgcaagccctgtggtgttttgacagtgacactggcttcattggctaaggcatgtcttctccactagaaaaaaatcaatgaaacatgttctgtacaaaggcagtacatatcttttgcaaaataatttattgtatttgttcatccaaagagagagaaggaggcagaggaagtgggagaagaggaaaaaacaattgaaaatgagagaaccaggctctttatttaaccatcatgtagggaatgacaggtccttactagaaacatgagcaatcctaaagctgggagcagaacatagtgatttagtctgctactattttgtcacatgtgaggtgcaaaaataaatccataagtgaaagataagacaagcatttatgtacagggtctacatatcaccaagatggtggatgagaagggaaactgctctgaaaactaggaaacaaatgtaacctgagaaacctaaagcagggcagccaaaggtcttccctatatatctagtagcatgtactctttgcaaataacagagatactgtaacttggcagagaaagataggtgctgatgtgaattagtcagatgtcagtgttgggaaggtgtgctggtttgaatatgcatggtccaggaaatggcactattagtatggatgaccttgttggagtaggtgtggccttgttggaggaagtgtgttactgttggtgtgggctttaagactattgtcctagcagcctgaaagtcagtcttccactagcacccttcagatgaagatgtagaactctttgctcctcctgtaccatgcctgcctggatgctgccatgctcccaccttgatgataatggactgaacctctgaatctgtaagccagctccaagtaaatgtccttataagagttgccttggttatggtatctgttcacagcagtaaaaccctaataccaaagagaactagagacatatgctgtatgaaaaaccttcattttcatgttttacaaaatgagctaccacctacaagggtcctcaataagaacgtcagcaccggacacccaggaacaattatgtacctttcctggaatcagtaagtgacaagtaatggacttgaactcaaggccccacaatccaaggttatgtttgtaaccagtggttctgagtgtagctctgaggcagcaacagcactgtggcctagaaagtggttagaggtcagaaggagagactgcaggggaggggcagcaatccttcccttagtacaggaaccacacttaaccattaaagtacaacagctcttctactctgaaatgctggaaattctgccttcactcccttctgtggaagatgtttagtttgcatgaaagtacaattcattatgtatagttttaaaaatcaaaacaagggctggcaagagagtttagtagataagagcacttgcgaccaagcgttaaaactagagttggattctcaatacccatgtggtggaaggaaagaagcaactctttcaagtgttcctctgacttctgcacatgttgttacctacatgcacacatacatatatgcatacatagatacacatgcatactaaacaataaaaaattaatttgtggtgacaaaaaatataaaacaattggctacttagggtttcatcttacaaaatgtgaataatttcatttatctctacatttacctctagggtcgaacctattccaccctaaggtattacctccagcatctgccaaggctttttgattgcaaggtaggcatggtgagtatacatggccctaaggttttacacaaagaaccaagcattggcttgataatgaaggattactgggctgagctcctggaagcctgaggctaaaccagacctacttcttctagaggaagctggctctactcctttgaaaggcaaaaggccggagtttttcaaccttccttatgctgcgacccattaatataattcctcatgttatggtgacccccagccatgaaattatttcattgctacttcataactgtaactttgctactgttacagaccgtaatgtaaatatctgatattcaggatatatgatatgtgaccccatgggggttgcaacccataggttgagaataagtgtggtaagcgctctctttgtctcacgttctaccctgaagatagacactgaggtagtcaatcacaccatttcctgtactcctatctatggggggtgggaggggctctgtgtaccgaagcatggggctgttgctatatcctcgaccctttccttactcttccccagcttctccccacctgcccttcaacctggtgccccaaaaccagatattctgaccactcaagaccagtaaaataaatgattctgcagggatgcagttattatcattcatattatggaataatagtcctagtgagtttgacaggtattgttgatatacttaaggtttagggaaatatggttctatcaactgtgctgggaaagaaataaaagactcccattggtctcccttggaggatatctaaaccacagggatcacgtaggcctgcctacatcctgcaagagagaaacagtaagacaggtgccaagatctcagactgtctgctcccagcatgtgtgtgcttgaaatggaatctcaaattctcacagaatcatggtccatactgaggaatcgtcgatgccttggaggctcccattttcatcctgaaatgtgatcagaaatagctggttgaattccagagagagagaaccggggaatgggggataccttgtcacagttccagtgacaaagcctgaaggataaaagatgcctgcacactctccatagcctcttcctccttaaagaaacactatcctcaattttatcaggcttttatgatcctaaattcttgcctcaggctagacccctatctaagccttccttacctgtctcatcccactcccctccaaaatccaaagtaacaaattcagaagaggatacgtgattgttcagtggtagtcaaagttgaataagcaagaatgaggactcctcctcctcctcctcctcttccttcttccttcttccttcttccttcttccttcttccttcttccttcttccttcttccttcttccttcttccttcttccttcttccttcctcctcctcctcctcctccttcttctttcttctttcgtttttttcctgatcaagagattatttccctatagggtgtagattgaagactgcattaaaaagtgactaaaccgtttaaaaggattaactgggtaagccattcccagtagtaacagcttgaaaaggctaaattgttcataactgaatggtctttaaatagaggaacctgtaatccaagcgtttagaaaactagggctagtgtctaagaccagcctgagctgcatagttatgacactgtcttgaaaagtttttaaaaaattaattaatgattcttttacatttaacatatttcaaccaagagcctactgtcagcatttactatagtttccttattataaacaagttatttctgatatcatatataactataatatataaatataatatttatattttatatgcatgtatattacatatatatatacatcttaagttttcattattttagtgaatttaaataatcttattaatttaaaaatgaataatatctacattactatttcttttggggggtgggtcgagacagggtttctctgtatagccctggctgtcctggaactcactttgtagaccaggctggtcttgaactcagaaatctgcctgcctctgcctcccaagtcctgagactaaaggcatgcaccactacacccggcttacattactatttctaagtctttacatatttatattatacagatacagcctccaagagtgtccactgtgacctcctcatagtacagctggataaagtttgtaatctgagtaggagacagactctggcctggagtcaagttcttgtaacttcaatatcagcatttccttactaaattcaatgtcttctacacagattctaattttgccatatgaatttttaaatttccaagattagagagttataatactgaattttttcatggccttgttgtaatgagagcaaatataaattagaaggtgattggaagtgaatcaggagcccaaatttatagcttcgagggtgctacttgaattaaaaagttaattataatgtgaatatggatgaaagggttatttctcattatttaaaatatttacatatttataagaagcttcatagaaggtacttgaatgctaatttttcttgtgtctatactaacctaataacttcatcatattgtgtaacagagttcataagttttaaaatatgttaaaatccatagagacattaaggagagaaattatactcctgagagcactgaatagtcttttgaaagattgataacagctgttgtagctagaattggttaattaatgtagtagttacagtattaaaaatttatcaatgtgttaatggagtatagacaatatttgatagagataataaagatgattttatacgacaaaagggaaacaaagggaaagtctcgcttgagagcatccttttgagctcatgcccacattgttgatcttgttcagactctgggctgcctttgcatgctgcctagtatggcaatatacgttacaaacgacacagtagacatcaaaggtgaaatgttaaacaaggtagacaccatacagaacaagctcggaaaactggttctgctactaattatgctttgggttcttatccattgcactgtgcccaagacccccatcctcacctcattgactgaaatctgaactcatgatacagcgatcccactttgcattaaaaattagtgcatactaaggaaatgaacctagtcaagagacatactccacttcttaattatcttaacctcttacttgttattcacttcttaattattttaatacacaacagtagccatcacgtggaaacaacctatatgtgtacagtggatgcatggataatgaacatgtggtacctatacgctatggtgtagtatgtagccacaaaaaagaataacttcctgccacttgcaatatgttagatgtttctggagatcatttcattaaatgcagcaagagaaactcctcactcatgtggatataaaagagctggagttgactttataggcgccaagaacagcgaagtgattaccagagactgatgagcacaagaaacagagtgtgggaaagactgaccaatgagaacagagcatgggaaagactgaccagtgagaacagagcatgggaaagactgaccaatgggaacagaacatgggaaagactgaccaatgggaacagaatatgggaaagactgatcaatgggtacgaagctacagttcagccagagcaagaagtgtgctgttgcatagcagttatgttctgtgtatttcaagccagaagacaagagtcagaatgaattcatcacaaagaaatgttgattgcctgagagatttagcccgatttgaccattacacagtctatccctgtataaaaacggcacctgatattctgcaaatatatacaacttttatgttcttaatctatctattagataaacagaaacattacaataaaatagacgatgcttacatcacacatgcacaagtaatgtgattacatacctgacacacgttcattttcaatcactgacagctaatatcaccaccaccaccaccaccataatccttaccaccgtattcaccacggtcagcattgtattcatcatcgccattgctgttatgattccgatatctaatagtaaatggctataacggcacctatcttcatttttccaatagtttctaatgttcacgatattgctcattctctgagatgagaagcatcatctatcgacaaacatagttatacacaacacaagcttgtgcaactccttactgactcatgctgcagaaacggtaaagatacaggaggatccaacataatattctgcatctagaccatggtaggtggagggttccttttcagtaacatttaaatctctcaccagagacaagtcatctaacaaagcttggccctataaaccaatagtgagtcaagggcaaatagcagctctgtccaagacatgcaactttggctcttttgatccatcctctgggaggcttgctgcaatttctctatcaaaaagttaatgggaaatgctgccttccgacaagggaattgatgtgtcactgccataaaattaagagttttgtgggatgagttaagttttgcccagtttttctgtttgcatcatgtacttaaaaagatgtctgtgtgtaaggatgtgcattataattgttacaaaatctatattctcaccaagcatggtggttttctagtctaagccctcaggagggtcagggaggaggcatgagaagtcagggccagtcaaggctataatgagactgtctggaaaacgaaaatgaaatcaatttatattatcacctatgtaatacttttggctataagagttttctgtttgttccctgatagagtgggcttatataggggaaagcatagattatgctgggggtagtggctgctatttgtagtccttatctcttcggtggtgatggcagggtgatcagtgagcccaggaattcaaggccagcttgaacaacatagtgagacctcatcatcacctaacaaaattacaaatctaagcatcctatggttttccctttatctcagaggagcaaatgtccatctttgcagacagacttgcatacattatatttaagagacagtattacctagagaacactttttttttcttctactgacttctggttcctacccatgagctacatggctagttgcagccacaggagactctgcatataggccactcccttatcataacctactgagccgacttcagcacaggaaatgactcttgagaccaccttacctgtctgaccaagggctgcatttgtgtcactgttatgaatctcagctcctaaaactccatgcactggggattccaatcattttaaaaatcagatttaaataagcctggcttgaactacaagtgttactgacttgccagagtgaagattataagaatttaggctcagcactgactctccaaggctctacaaaagcctacacattttgtcagcatcaatcattgaagcccttgggctatttcccagggcctgttcgtcactacaactcaatcctaggacccacaaggctgggtccctgagcctagagacatattttaattcttgctggcctggggaagttttccctctcctaggctattctgggtgctggtgataaatcttttcctgcttgcaagacagtattgctcctccagttttaggcatggcagcatactcctctctatctccctgtttctagcaacattcctctatccccttctggtcagtgtagtttctccacagctcaggatttgggacaacaaagtacagaaagagaaaggctatgactgtggggagccttgatttgggagcccttgaataagcctctcctaaggttttgttttcttccagacgagtacaggaagaaaacaagcatcttaatgaactaccctacatgctttgaaagatcaaactgcagagagttgttgggtgcataagcgtgtatgcagagaacacttcagtcacaggaaataactacggctaataatggctgactatgaactagagatcttgggcacactgccacaagaagtgggtttgctttatcctgaggaccatctgcagcatttgaatttatttaacctatgcacacaaggcttcctgcatatgtagagaagtttctttgactctggaaagtgaaacagaataattgatttaaataacaattctcttagttatttaaaaaacaaaaacaaacaaacagacaaactgtaagtatggtgatgttggtctgtagtcccagcattctggaggtaatcccagaacaggaaagaagaacagaagttcaaggtcaccttcagctatagcttaaagtaataaggcaacctgatctagagactggatgtcaatcaaaaaggctccttcattcatagaagcattaaataaatcactttgtttcaacaaaccatttgaaattattatttttctcatacttgcatacattatatttaagagactgtattgcctagagaacactttttttttcttctattgacttctggtccctacccatgagctacatggctaggtgcagccacaggagactctgcatatgtcataggccactcccttatcataacctactgagccgacttcagcgcaggaaatggttcttgagatcaccttacctgtctgaccaagggctgcattgatttatttatttctcatttgatttattttacaaaatcagataatgttatattaccttcaaatttagatttgattgttaaaactatttatgcacataaatttggcagaaactaacttagtaccttgtcctggttagcctttgctgtcaacttgactcagcctacagtcctctgagaagagaatcctcaatggacaaattccctggatcagtctggtctgtgtgcatgtctgtgaagggccgtcttgattctgtattgatgtaggagaatgcagcccattgtaggtagcagcatttctctgagcagaagccagtgagtaagccagagaagaagtccaaattcaatgttctgctggttctggcctcaagaactgagttccttcaatgatggactgtgacctgaagataaaagtcaaattaaccctttccttctcagattgcttttggacaaagggttttatcacagtagaaaaaaaggaaattagaaacgtgttaagaaaagtctctgtatgtaggtgtatgtgttccctgagagggaatcaactgatagaatttatttgatcatccagcacaattcagtcatgacaaagtcattccatttttcctccctcatcaccttccagtgaagcttaagtcacatttgaactgtgaagaggtacatttacaaggatgcctgtcaatggcacatgtttgaagatgatgcttactctgcctggtgaacatggaatacaaccgcttaaaacatcttcatgctgaacaatgctagtctccagggatgaggctgctgaaggactcatgaggtacctcatggcttccaagtgtctcactccaactgggccactgctttcacacttgtccttctcaaaacccactatgtcatcttcaagcagtaccagtgatgtgcaacgtcactgaatgaggaaaactcgggttgctttcccaatcctagttctcacaagagtttgaggagtcttctcaaggcaaagagaatttacctaaacaaggtgttggactccataaaggccaaaagtcaccagtattcatgaggcacacatcagtgcagcacagcacagctcttggtgcagggcaaagaagaatttactaaataatatgataaagtaagatggctttgagttctgagagtcactggaatttaacatcaggggcaaggggtggggagaggggggaaaatgtagaatatgaagcaaaagactagactgccaccttccaattgtgacaaagcaaagtttaattgttttctggttattggataaagagttagtatcatggctggcttgtggctcattggtaggtcacaatccctctgggttccatccctagcatgggaagaacaataaccaagctaatgttaacagacctaagtcatcccctccatctaattcctggcccttacatcagaagtagctaatagtgataactgactctcgattaactaaaaaatcaccaggctttaatttaaattagagacaacttagatctgaagagtgttagtttagaatttattttaaaataaataaatccagctaaaaaccagattcacagatgccccagtagagaagttgaagcccttacctttaaaatatgctacatctttgtaactgtttctatctccaaaactccagcccctaactttccatcctagccctgggtggttcttcctcctcttcatcatcatcatcatcatggtcattccctcatcttcctcgttcgtcctccttttttttcttcccccctcttcttcctcttgtgctagggactgaaaccagcaactcacatgtgttaaatatgtactgtaccaccaagctccatccccaccctacagggccgtctaattgacctcttgaaaagtcccttgcccttcctatgtttctgttagtctttatttcctatttgctctaatgtgtggaaatattaaaccaagaaaaaatatatctttctgattttatagattccctggctgctgtagactgacagggtaatgcaaagaacaaaggggtttgaggaaggaagccacttgttcatatcttcctgcccttcacctccagatgagattggaattttagtccaagctcttgctccctggaagcaggagcctctcctctccagcatcaatctgctttgttcactccccatggactcctcctagagcagatgccttgggcgaagacttagtaccagccatggtgcatccaatgtttagaaactcagacgatgctgagggagtggctggatctgtaagcattctcgatagctagatgacatctggccatagcagctattccctcttcatatccaatgtgaaaattcaatgtcctcaaaagtgctgtgatcactattcctgttgtcagcttaactacatctagaattaactgaaacccatgactaggcacagctgagagattttttttttaactaaatcatttgaaatgagaagatatacctttaatccgggccacactttctgcgggcaagcctatataaaggacatggaagaaggaagcttgttttgtctttacctgcttactctcactctctctagcaagtccattccttttctggcattagagtctacctcttcaggaccctggtttatattgaagatcagcaaagatacccagcctcatggactgaacaactactggattcttggatgtttaattggtagacagccattgttggactgactggctgggtcacagctgtaagccacttaataaatttcctttctctggatagagttggcaatttctctagcctccactcaactgctacctagcaacagtttgctagccacatgcaaggtgttggcaaacctggagtgtaaggaccattctgtctctgtgtctctctgtttttctctctctctcgacagggacagacagacagacagacacattcagagaaccctggcaaatacaagcacattccatctataatctgcagagaatactagctataattgtaaagcttgacaggcacagtgcctttctctaaagcaacagaacacgcccctcccccatagttgttctttatttaaaacattttcaggttttcatctgcccaagtcatctgtgcagaaggaaggatcagacatgaccaattcaaactcaacatgagctctctgcagctgctctctatgaaagtcattttaagctatgactagtaacctgacactccagaggctgaggcaggatgacctgagttggagtctagcctgggttgcttactgagatcctatcttaaaaaaaaaaaaaaacacacacacacacacacacaaagaacactgcaaataagcaagcaacgaaaatcattttaagtgctaatgaaagtaaaacccctgtgagaaaaataaagcatcagacattgaagccacgggctggagaggcttgctactcttgcagagaacctgggttcagttcttagcaccatgtcaagtggctcacaacctcctataactccagctcctggggatccagtgactctggcctcactagagtgcacaatacgctcatacccacacacagctacacataattcaaaatagtaaaattaaaaataaaatgaagccacgtgtactggctcacatctgtaaacccagcactgaggacttagaaaactaagcagagtgattatggcctcaagcctgagctacatagcaaggcttcatttcaaaaagaaacaaccaaagaagcaaaaaaaaaaaaaaaaaaaaaaaaaaaaaaaaaacaaacaagaaataaaattaaagacattgataaatacatcttccaggcctcctactaagagcaatgtacaatgagtttagcattatagtgagtgaaataacagatgataatacttggaattttaaaattaacacaggagttaagtctatactaattaaatagtttttaatatgaaagggtgattattacagacggttgttatttaacaaatatagaagtgggcaggagcggtggacagggtcctttcagcttccatctgcacccagaagctggggctgttccatagccctctgtgtacagatcctgcctgggtagagcaggtctccagggagagctctaactcccaggcttggaggtgagatcgcaattatctctctggtgactgtctaagccaacaccagccaggagtacatatggcacaagagcagtagagcagctgggacaaggtccttcctgcctcaatctgcacccaggagctggggctgttctatagccctctgtcctgccaagggggaagttggtctcccaggagtgctgaaacaggtttacaggaccacaggaaggacaagctgaagctagagacagctagaccaactaacaccagagataaccagataaccagatggcaaaaggcaagcacaacaaccttaccaacaggaaccaaggctacatggcatcatcaaaacccagttctcccacaacagcaaatcctggataccccaacacactggaaaagcaagatttggatttaaaatcacatctcatgattctgatagacaactttgagaaggacataaataactcccttaaagaaatagaggagaacacaggttaacaggtagaagaccttaaagaggaaacataaaattcccttcaagaattacaataagacacaaccaaacagttccaaacaggtgaaggaattgaacaaaaccaccagggtcaaaaaaatggaagtagaaacaataaagaaatcacaaatggagacaactctggagatagaaaacttaggaaagtggtcaggagttatagatgtgagcatcaccaacataatacaagagaaataagagagaatcacaggtgcagaagatactatagaaaacattgacacaagagtcaaagaatatgcaaaatgcaaaaagctcctaacccaaaacacccaggaaatccaagacacaatgagaagccaaacctaaggatagtggggatagaagagagtgaagatttccaacttaaagggccagcaaatatcttcaacaaaattatagaagaaaacttccccaacccaaagaaagaaatgccagtgaacatacaagaaacatacagaactccaaatagattggaccaaaaaagaaattcctactttcatataataatcaaaacacaaaatgcacaaaacaaagaaagaatactaaaagcaataaggggaaaaggccaagtaacatatataggtagacctatcagaattaaaccagacttcttaatagaaattatgaaagtgtgaagatgttgggcagatgtcatacagatgctaagagaacacacatgccatcctacactattatacccagcaaaattgtcaattaccatagttggagaaaacaaggtattccatggcaaaaacaaatttacataatatctttccacaaatccagcccgtcaaaggataataaatagaaaactccaacacaaggaggtaaactataccctagaaatagcaagaaaataatcttcttttaactaaccaaaaagaagatagccacataaacataattccacctctaacaacaaaaattacaggaagaaacaatcacttttccttaataacaatagactcaattccccaagaaaaagacatagactaacagactagctacattaacaggacccaacattttctgcatacagaaaacccacctcagtgacaaaaacagacactgccccagagtaaaaagctgaaaagcagttttccaagcaaatgatcccaagaaacaagctggactagccattctaatagcaaataaaattgactttcaacttaaagttataaaaaatataatgagtgacacttcatactaatcaaaggtaaaattctaccaaagtgaactctcagttctgaacatctatgctccaaatgcaagggcacccacattcgtaaaagaaactttgctaaagctcaaagcagacattctacctcacacaataatagtgggagacttcaacactccactctcatcaatgaacagatcatggaaacagaaactaaacagaggcacagtgaaactaacagaagttatgaaccaaatggatttaacagatatctacagaatattttatcctaaaacaaatgaatataccttcttctcagcacctcacgataccttctccaaaattggccatataattcctcacaaaacaggcctcaactgatacaagaagactgaaataatcccatgaatcctatcagaccatcatgggggtctggtcttcagtaacaacaaaaataatagaaaactcacatatacgtgaaagctgaacaacactctactcaatgataccttggtcaaggaagaaataaagaaaaaaattaaagacattttagaatttaatgaaaatgaagccacaacatacttaaacttatgggacacaataaaagccatgctaagaggaaaacccatagctccgagtgcctccaaaaagaaactggatggagcatacactagcagcttgacagcacagctgaaagctctagaacaaaaagaagcaaatacaccaagaggagtagatggcaggaaataatcaaactcagggcagaaatcaaccaagtagaaataaaaagaactgtacaacgagtcaacaaaaccaggagctgattctttgagaaaatcaacaagatagataatcctttagccaaactaaccagagagcacagagacagtatcaaatcaacaaagtcagtagtgaaaagggagacataacaacagaaactgaagaaattaaaaaacaaaacaaaacaaaacaaaactcatcagatcctactacaaaagcctaaactcaacaaaacttgaaaatctgaatgaaatggacaattttctagacagatatcagttaccaaagttaaatcaggatcagataaattatctaaacagtttcataaccactaaagaaatagaagcagtcattaatagtctcccaaccaaaaaaaaaaaaagcccaggaccagatgggtttagtgcagagttctatcggaccttcaaagaagacctactaccaatactcttcaaattattccacaaaatagaaacagaaggaacactacacaatttgttctatgaagcaataattactctgatacctaaaccacacaaagacccaacaaagaaagggaacttcagacaatttaccttatgaatatcaatgcaaaaatactcaataaaatccttgaaaattgaatccaagaacacatcaaaacaatcatccatcatgatcaagtaggcttcatctcagggatgcagggatgattcaatatacagaaatccatcaacataatccactatataaacaaacacaaaggagaaaaacacatgatcatttcattagatgctgagaaagtatttgacaagatccaacacccttcatgataaaagtcttagaaagatcaggaattcaagtctcatacctaaacatagtaaaaacaatatacagcaaaccagtagccaacatcaaattaaatggagagaaatttgaagcaatcccactaaaatcagggactagacaaggctgcccactctctccctgcctgttcaataccatattcaaagttctagccagggcaattaaacaacaaaaggaggtcaaaggtatacaaattaggaaggaagaagtcaaaatatcacacttgcagatgatatggtagtatacttagtgacccaaaaaattccaccagagaactcttaaacctgataaacagcttcaccaaaatggctggatataaaattaattcaaacaaatcagtggccttcctctactcaaaggataaacaggctggtaaagaaattggggaaacaacacctttcacaatagtcacaaataatataaaatatcttggtgtgactctaacttagcaagtgaaatatctctataacaagaacttcacttctttgaagaaagaaattgaagaagatctcagaagatggaaagatctcccatgatcatgtattgataggattaatatagtaaaaatggtcatcctgccaaaaacaatctacacattcaatgcaatccccatcaaaattccaagtcaattctttatagagttagaaagagcaatttgcaaattcatctggaataacaaaaaaacccaggatagggaaaactattctcaacaataacagaacttcttggggaatcaccatccctgacctcaagctgtaaagtagcagccggcagatcaatgaaatagaattgaagacccagaaatgaacatacacacctatagtcacttgatctttgacagaagatgctccaacatgttataaagacacatgctccactatgttcatagcagccttatttataatagccagaagctggaaagaacccagatgtccttcaacagaagaatggatccagaaaatgtggtacatttacactatggagtaatactcaggtattaaaaccgatgaattcatgaaattctcagacaaatggatggatctgtagtatatcatcctgaatgaggtaacccaatcacaaaagaacacacatgctatgcactcaatgataagtggatattagcccagaagctcagaatacccaagatacaattcacagactacataaagctcaagaagaaggaagaccacagtccggatacttcagtcctttttagaagggggatcaaaatatccatgggaggagatacagagacagtttggagaaggaactgaagcaaaggccatctagtgactgtctcacctggggatccatcccatatacagtcaccaaacccagacagtattgtggatgccaacaagtacttgctgacagtagcctaatatagctgtcttctaagaagctctgccagtgcctgacaaatacagaagtggagactcacagccatccattggactgagcacagggtccccaatggaggagctagagaaaggataaaaggagctaaaggggtttgcagccctataggaggaacaacaatatgaaccaaccagtaaccccagaactcccagggactaaaccacgcaacaaagagtacacaaggaggaactcaaggcttcagccgcgtatgtagcagaggctggccttgtggaacatcaatgagaggagaggcccttggtcttgtgaaggcgtgatgccccagtataggggaatgtcagcacagggaagctggagtgggtgggttagtgagcagggggagacagagggatgtagggggaagttcagaggggaaatgaaaaagggggatagtaaaaggaccttgatatagctgtctcttgtgaggctatgccagtgcctggcaaacacagaagtggatgctcacagtcagctattggatggaacacagggcccccaatggaggatctagagaaagtaccctaggagctaaaggggtctgcaaccctataggtagaacaaccatatgaactagccaatacccccagagcttgtatctctagctgcatatgtagcagaagatggcctagttaggggtgggtgggtaggagagctgggggggtggtgtggggggctttcgggatagcatttgaaatgtaaatgaagaaaatacctaataaaaattggaaaaaattgaaatgtaaataaagaaaatatctaataaaaaatatacaagtgataataatttttaaaatgtcaatctgcaggcagctcagtaaacctggtcattcaagaatcacagatggaagtatattaaatcaccaaatgaaatattaaagagtaacttacttctgcctcctaagccagctgtgcacaaatgactaattatagaggccctggttagctgaagaaacagtacacacctacggatacatatgaataaacttaatgtcactactaatgggagaaaccaatatctccccactacctgccacaatactctgaaaacaatacatcacccatgttgtttcccggccaaaaatatttaacctcaatctaatcatgaggtgaggatcaagcacatctaaatccagtactattcagtgaaggaagtggccatggagctagtgaaatatcagtgccctgggctctacttgcaaaaggtgaactctccaaggctaacagaggggaaagacacagcaagcaagcacatcaagtatagaaacaacaaaacaaattatgaaaccgggacaaagatgtggccgggacaaggaaatttgcatgttaaacaataaagccatattaatgtcctatctcctgtgtgatattgtattttggttatttagaaaaattgactttcacaacatggcatggaggcccatatctataatcccaactcttcggaggttgagtcaagagaatggaaagttcaaatccagcttggtcaccacagtgagttctcctctcaagaaaacaacaaagctcagactaacacttagaacacctgtcaagctatctatcgattgatccatacatggatggatggatggatggatggatggatgnnnnnnnnnnnnnnnnnnnntaagtttagagaataaacacatatgattaataaaagaattctattttaaatttattaacaagataagaggctttttcctacatctgttccttcgagctccctcagctcccagagtccatagtttattttaaagcaccatgagaagagacatagctttttgctgcctcctgttctcctacccctttcttccctattatttggtgtcagaaggtgctgtggccttaggctgagttctcctagagacagagcagccctctgggatttgccccaagacgctttttaatgagctctgcctactttctttcttccctttctggagaccatagctggggtggtaatggcatgtaaatgagttctgagcactgactaattagagagggcccctggagaggagccagctgttggttgtaaaaggaaataaaataacaggtcacagcaataagttaaatcatttcgaagctgatttctaggcatttttccttgcagggaatactaagcaaacagaggaggcagtgaagaccctcagataaagggagaggaccaaagaccagtcactgttctggaatcttcccctggaattcctttctagcaaatctgaacccctgtgcatgtgcgcgcacgcacacacacacacacacacacacacacacacacacattttgagtgctatctccatttgtatttttactctaaattcataatttgacattcattaaagtaaaaataaagttggttttccgattttccagggaagtgtacactccctctgttcagttttctccagtactttctttctgtctttctccggtctccagtctctactaatcaaatcaattaggcatttactatatttggctttaacccaattctcttgaaaatctcttccattgccaagacgttagacatgatgaaactaaagctatgtcagataaagaaaggggatgactggccaaaggatctatggtcaaagggctcatccatctaaggagaccttctttacctttcccatgccaaggacaccacactgggaccgttctcacagttctaaaccagtgatggcatcttgggagctcttgacaatggctgtcactgtatgaagtttttgcttttattaatttttttctttttttttttccttcattttgaagacaggagtcttactttatatagcataggctgacttcaatctcccaatcctcctgcctnnnnnnnnnnnnnnnnnnnncctcctccttcctcagtggattccaggttcttctttagatccctacattgtaatcatttaattaattacttaaagaatttgtttacttgggtcctttacaaggtctccagaagttgactgaaaggcagcttctaatggttgtgcctataggacaagaatgaatgctaggttgggtctgtacagttctgtggtagagtccttgcctgccatgtggaagatgtgggttcaattcccagcacttacaaaaaacaaaggacagatcagtgccaaatctgggttcttgttacttcttgcttcctgctttatagctttcaaatctcccatgattgattgattgattgattgattgatttctgtttccagtgttttcctgcccttctaggtcatttgtatttgtttaatttttctctacgtttctctgtctctgtctcctctctctctctctctctctctctctctctccctctctctccctctctctctctctctctctctctctctctctctctctctctctctctgtgtgtgtgtgtgtgtgtgtgtgtgtgtgtgtgtgtgtgtgtgtgtctgtttttattttattttgctttgagacaaggtcttgctatatactgaagaatggtctttaactagtgacctgtctgcctctgcctctgcctctgcctctgcctctgcctctgcctctgcctctgcctctgcctctgcctctgcctctgcctctgcctctgcctctgcctctgcctctgcctctgcctctgcctctgcctctgcctctgcctctgcctctggctttcagggactatgtgtgtgccaccacattctgctggctgatttcttgaagctgggatctgtaaacaagtctagtctctttgcttagtacttcaaatggaactgcttggtaagctactgttctgtggaaatactctattcaagactcacagccaagaaatctgctgtaattctggatctaacagaaattcttcttggatgaggcatagtataaagtcaaatcatgtacccagaattaaaatgtgacctgtgagcacaggttgaagacagcatggctgactatctagacaataagcaaactatagaatctaaacccacaataaagaaataaatgtgtgctatttaatacctcacagtccatttattctgtcagagtctccaatctagctaggtctagaatgtctccacagtcaaaattcaggatcacatttcaatatgaaaattctcattttgaaagcataagcaacatgaagctcagtnnnnnnnnnnnnnnnnnnnntgtacactccctctgttcagttttctccagtactttctttctgtctttctccggtctccagtctctactaatcaaatcaattaggcatttactatatttgactttaacccaattctcttgaaaatctcttccattgccaagacgttagacatgaagaaactaaagctatgtcagataaagaaaggggatgactggccaaaggatctatggtcaaaggactcatccatctaaggagaccttctttacctttcccatgccaaggacaccacactgggaccgttctcacagttctaaaccagtgatggcatcttgggagctcttgacaatggctgtcactgtatgaagtttttgcttttattaatttttttcttttcttttttttttttttcattttgaagacaggagtcttactctatatagcacaggctgacttcaatttcccaatcctcctgcctcagccttgtgagtactgcgattataagcatacaccatcatgcccagcttatttctaaaatttaaaacatctttatttatttatagggcagatacagcccttcactaaaatttttcttttaatgtgtctatagctcaaaagagtcatgtatctttcttcactgggtgaattaccatgatataagttctagaacatacaagatcatagatataaacagtttcaaaaaatgtgaagaatcttgagtggttacaattgcatatgtgcaccgatgggcataaacttattctgtgcacatcaacatgctaaacaaaatgtgtgtgtgtgtgtgtgtgtgtgtgtgtttgatttctggtaatcaaatgactttctgtgaattttaactcagttttgaatcttcacccttgtccaactcttccagcctgaaagacacactcttcctcctcctctcccccccccctccttcttcctcagtggattccaggttcttctttagatcctacattgtaatcatttaattaattacttaaacagttggtttacttgggtcctttacaaggtctccagaagttgactgaaaggcagcttctaatggttgtgtctataggataagaatgaatgctaggttgggtnnnnnnnnnnnnnnnnnnnnttgagtggttacaattgcatatgtgcaccgatgggcataaacttattctgtgcacatcaacatgctaaacaaaatgtgtgtgtgtgtgtgtgtgtgtgtgtgtttgatttctggtaatcaaatgactttctgtgaattttaactcagttttgaatcttcacccttgtccaactcttccagcctgaaagacacactcttcctcctcctctcccccccccctccttcttcctcagtggattccaggttcttctttagatcctacattgtaatcatttaattaattacttaaacagttggtttacttgggtcctttacaaggtctccagaagttgactgaaaggcagcttctaatggttgtgtctataggataagaatgaatgctaggttgggtctgtacagttctgtggtagagtccttgcctgccatgtggaagacgtgggttcaattcccagcacttacaaaaagcgaaggacagatcagtgccaaatctgggttcttgttacttcttgcttcctgctttatagctttcaaacctcccatgattgattgattgattgattgattgatttctgtttccagtgttttcctgcccttctaggtcatttgtatttgtttaatttttctctacatttctctgtctctcctctctctctctctctctctctctctctctctgtgtgtgtgtgggggggggggttgggtgggtgtgggtggatgggtgtgtgtgtgtgtgtctgtttgttattttattttgctttgagacaaggtcttgctatatactgaagaatggtctttaactagtgacctgtctgcctctgcctcagcctctgcctttggctttcagggactatgtgtgtgccaccacattctgctggctgatttcttgaagctgggatctgtaaacaagtctagtctctttgcttagtacttcaaatggaactgcttggtaagctactgttctgtggaaatactccattcaagactcacagccaagaaatctgctgtaattctggatctaacagaaattcttcttggatgaggcatagtataaagtcaaatcatgtacccagaattaaaatgtgacctgtgagcacaggttgaagacagcatggctgactatctagacaataagcaaactatagaatctaaacccacaataaagaaataaatgtgtgctatttaatacctcacagtccatttattctgtcagagtctccaatctagctaggtctagaatgtctccacagtcaaaattcaggatcacatttcaatatgaaaattctcattttgaaagcataagcaacatgaagctcagtnnnnnnnnnnnnnnnnnnnncctctgcctcagcctctgcctttggctttcagggactatgtgtgtgccaccacattctgctggctgatttcttgaagctgggatctgtaaacaagtctagtctctttgcttagtacttcaaatggaactgcttggtaagctactgttctgtggaaatactccattcaagactcacagccaagaaatctgctgtaattctggatctaacagaaattcttcttggatgaggcatagtataaagtcaaatcatgtacccagaattaaaatgtgacctgtgagcacaggttgaagacagcatggctgactatctagacaataagcaaactatagaatctaaacccacaataaagaaataaatgtgtgctatttaatacctcacagtccatttattctgtcagagtctccaatctagctaggtctagaatgtctccacagtcaaaattcaggatcacatttcaatatgaaaattctcattttgaaagcataagcaacatgaagctcagtagaaatgttattcaaaacacaagctaagtcatgtggattggtgtctgcagccctacaagatttgcacttatgtagggcatttgagggtaggaaattattccttttggagctggtgagatggctcagcaggtataggcacttgcttgcacagcctgaagacctgacttcaatccctagaacccacatggtggaagggagagctgatccctgcgagttctcctttaatctccccctcaacacatacacgtatacacacattcacgtgcaagtacacaccttacaaataaacaaacattattgaagcaaggaaatgatttctcttgataagtgatggtctttcaatgtttcatttttctcttttcctttgttagtatgtattaactctccagaatgttaggttttattatgacatttcttgcatataatgaccttggttctggctcacttcctgtgagtctctgtgtctatcccattagtacctgtcctcctcccccttgtcttcctcctccacattcttctttctcctctttcactactctttaaaggcttgcatgtgccatctttgggacgtatgaaggagctacgttgaggtatgaaataggagtggccatctgagttacactctttccttattctctagagctgtgacctgtcatccttaaagggactttgttggctcaagctccacaacacagtccactgcagggacagtaccggggcagtcgaacatgtgagggtccatctttacttgttggaatttaacacccttatacttgcactggagatgatatcatgaaccattaaatgtttttcaaatgtaatttatctggagttgtgttagagtcgatgttttcaaagaattaaacgttaccagcaacatttcagtcacaagtgattttatcttcaggtctggattggtaccaattgtcttttttgttttctttctctagatggaagattctaatgtaaccccctttttagatgctaaattataggttcaatatattcttgacacttgccatgaggttcagacactagttcttggtaagaattcataccaaactgcctttgggaaaaccatggaacacagtggtctgttgtcttagggttttcattgctgtgaagagaacccatgaccaaggcaactcttataaggaaatcatttaattgggcatggtttacagtttcaaaggtttagtccactatcatcatggtgagaagcatgagacccttcaggcagacattgtgctagagaagccaagacttctacaccttgatctgaaagcatccaggagactcttttccaaagcctgcctactcagtgacacacttcttccaacaaggccacacatattccaatgaggccacacctcctaatagtgccacttcccatgggtcaagcatattcaaaccaccatgtctactgttttgtgaattttctgtatttattttctctccattgaccatgacaaataagctacatattattaaaagtatagacttggcaacttctcctgacttcacaagtgtgaccaacattgatattgagaaggcagaaggctttcaacatggagagtttgcggaaaatgcagcagaccaccttagaaacctgtgctttcttgtaaaatgtggtggtccactcaccatacatacccattattcttgcactctaaagagtggtgtatatgatatcatcttgctcttgaaaaaatgaaaaattactttggaattatttactatttatgcaagcatatagcttactttgatccagtccaccccactcaattccttttccttcttctccaaattctccccttttctccctcaacttcaagtttcctcttcctctctacttcatctcccctctttctccctttcaacttcatttcacttctctcttcacctctcaaatttggtacctactaaatttgtttagtgtttcctgtatgcaaaacagtttaggaccatttatggatcatgggtaatagtgtctcagaacctgcatccctcagccatcaaccaatagcactcaactagggaagatttcagagccctccttcatctatgctggaattctgactggcttgatcctgtacaggtcttgtaaatacagttcccagcccctgtgagctcatgtatggaattgtcatacccagaaatgttgtttcactacaggagtaatacttcctctggctcttacaatcttcctgtccccctcttttgtgggaaatagaaacaacctggatatcaaaagtaaatatagcaaaataaaataaaaatttagacagaagctcaatctgcaccttgaactcagagatacacctgattctgcttcccaattcagagatcaatggtatgaaaattctaaatgtttcccaaagaaaagattctgctaaaatttctttattttattccttgtgttcacaaatgatgagaatgctgaatttgaattagagattaaggaaaacaaaaacttcaaaatccaagtttacgaatcacccatgaattctatatagattcagtgaaaagaacactaggatttccatataagatgagggattctgacttatttatatgctcagcagagaccacatggcactctagaaagaatggcttggcgtaaatcaatgtacaattgtaccatcattctatgaccttcaattgtgttttcagactgatggtgggggggggattctttactgcttgttgtatggttttcaaatatgtgaattgtttgtcaagagcctgaaactgctgatgatctcgaatcatttattctcactctgtctagcttctatcagataattggacttcacatgtggatggaattaaaatatctactttcagccagtgtttactgcctctgtgtgttttagagtagacagcttttaactctctctcaccttgacttcccaaacactcatgtactgaacctggcttggctcccttcatgaatggtccccctgaaccttctcattggcttcacatgctaccaaccagaaacgtaggcattccttttacatcagattttagggtggtcttcttttcaacttttctacttttataaccacattaaattccattttaccctctttttcaagttacatattatctttaactggcccaatccctgtctatccaattgttcagattttaatgaaagatggtttacagattctttgagaacctcgtgtacagtgtttcaggtacagaggatgtaaacctggaccaaagaaacatgttctttatttcatacatacatagaaatatggacacatagtcacacacagagagaaactcagacacacacacaacacacacggacaaagatgcatacacagacacagatgcatacacagagagagagagacatacacataaacacagatgcacatatataacagacacacacataaaacagcactcacaacaatgcattacagaacacagcacacatacacagatgcacacatacacacacagagatatacagacacagatgcatgcatacacacacagagatacagatgtgcatacatcacatacaagcacagatgtatatcacacacacaacacatacaaacacacaaaatacacagatacacaacaatgaactacaacacacagagagatgcatacacccagggatgcacccatataacatacagacacagatgtgcacaagcacatacacatagacacacagacacagatacagagacacacacacccacacacacaccaccataccacacaatctaggaaaacaatcttggacatggaaattttgagagtgatgtataggatggcaggggaagaaaatgttaccttgtgcactaataataaggaaatgtcacctctgtcatggtcatagagaaatgatgtttaaattagaaattagaaagtatgagagatcgtgcatggctggtatagaaattgggacatgagggtgcacttgcttcttcagagtccagagagaagggcagcaaaggaaaaggaaaaggaagatgctactgtagttcaaacctcagacaaggcatttgaatcccatagagctgcagaggcaggcagagtggaaatacatgccatcctcagtgtgggggtggaagcagcctaaggccggtggaaaccgtgagaagcaagttcaaactgggcaaagcccttgaattcactctttcaaattattagtccaaccatggggggaaaaatggtttgaaaaagagcacaaggccctgtcaggaaaccattggtggtgactctagagccagctcagagtcagcatgtagtccttgcagtaacatgagtccacgtgacctgtctggttcttgtttacatgttcctgtacttctaaaatgcctgctgcatgcttttcattcctatgtacttaattcaaacctcctgtttttcttgccagaagtatttcaacctcctccaccctattctagtcaacagctaatcccccatgtctcccttcaggtcacatgcaggtttgctgccagagttagcccttagaaacccatccacttgctgccaaatgcattgaaaccatgtccgagctcctcctctctgtccacagtctccattggattggctctttggatgtttctggtctcctccacctcatgagttgctacctcactctcttaccttacttgcttcttggctcaccaattcacaaatgtccagatgtactaatcctttccctcaaccctgagcaactttgtcttctggcttactcgtcaaagctcccgtgtctcagattcatgtcagatccagtctcctccaattccaggtgccctgcctagaattaccattttcctctctgctcatgttccaatcaatcacttcttacctacccacatcttatctcttactatggtatgcttcctactcaaatcagtgtgtctgggacaagctctctatctgttgtaagttcctgaggggcaaggaggacgttaacagtcacttttgtgtcatattttgtgacttgattgttctttcctactagggaatcaattaacattagtgagctcttggatagacacagattgatagatagctctccaacatggagaatgtcttgggccatgaacccaaatcacagtctagctctgacattccagattcatccctcatgagtttgttgtttgcaatatttttttttatttctgattcaggctaaatggggtttcaaaaggattaccagttaataatcttattaagaaatgctaaattgtgtgatagaagctaaaactcatttgataatcatctactgaattctgattgtaaagatgtgtgtgtgcgtgtgcgtgcacacgcgctaaaaatcaatcctatgacctcatacatgatgagtatatgatctaccactgagctccgtttcagtcctgaactatgtacctgtctatgggcattcaactgtgaataaacaggaacattgtgatgaaagcatttaacacgtaatttcattctccatttacagaagaatgtacatttagtaaactggaacaaaaatttttcatcctttcattaagaatctatgtgtctacaataacaatcgatgaaaaatggggggcatgaatttaaagaagaatggggagagctataggggagggcttggagggagaaaaggggaggggggaaatatagtagttaaaatgcaatctcaaaaatgaacaacaaagaatctatgtcacttaaatcagtagtgggaaacaatctgaagtgcaatgccaaagagaggtgtccatggtagacttgttcccattatattaaaaatatacaagcagaaagaactctaggatgctgttgatttatctaagttatgattattaccatcattttacatattctattttggtggcaggctctacacaatgtttatctatgtagtcctggctattctggaacttgctctgtacaccaggctggcctcaaactcacaggatctacctgcctctgcctctgcctcccaagtgctgagcttagaggtgggcaccattaccacctaggtattttacatattctttatctctgactttaatgcaactctaagttttgtaactttcttctctgtgttgcttttctccttgagctgggaggcatcgagaggagggttaagccgtaataactacatttattgaattccaatatatccaacattgtattagacagttcggatatgaaaaatttaattcatgctctcaaacagctttcagaagtggtattttataaaagaattggattgtgccaggggaaacattaggagtatgattctgaagaggaaaatacattcataggaagcactggtatattttcagtttcaagattaatttagaacccatcaatggcatgtgctagatttttctgaagtacaaggaaaaacagcatcaactttcagaacacctcaggttcgagtatggaatatgtaaggggaatttggtagacaaacagaaattgttatatatatatatatatatatatatatatatatatatatatatccaaaaaacttaaagattgctttccatgtttctctgaatgcaggtgataagatcaatagcttcaaatttagcaagttttatttgttttgttttgttttgttttgttttgttttgtttcaaaatcttttttaagaattgctcttgtggaaaacattcctgaaggccttaactactctgaagatgccccgtttcacttaccgctcttccaaggctggatgaacttgctcaacatggccaaaaagtctgtggacatagtgtcttcccattgggacctcaaccacacacacccagctgcatgtcaggtaagccacaccctctatgcttgtgctggttttatgtgcatctaacactccttattgtccttaccctcaacaagaccagaccagctcagtttccaaatcccacctcccccaagagcacaagagttctgtgtttattgtttatggagctgtgccatggttaagcatgtgtcattccactactatgatcaccccaggtttgtgcagggctagatcatgttccatctttgtctataagaggctctgtgtagagtgctgtggagcagcatggctttgaggatgccacccacatcatagcaccttcctacagcacggcctagaattctgtgttgtatagtttgcgggcttacacatctatctgcctgctgagacatgcatttggtccagttgtgttatacaattcactttcatgcctctgaactcactttttaaaataacaaagtccaacgtctcaggttagttggatatttttggctctgtcacgtttgtatagataagaaaaggtgatttcaaattaaatactctgaaggaaaatgtaaaagatccttataactttaatgtctttttctttatattggtaagctatgatggtttgcattgagctattactcatgtatatgaatactggactatatttaaatgccctgtatgggtcctgggtcaaatcaattttgtttctttgcatacaaatcatattgacaagccttatcatcgctcttgattgctgtcttgaaatgtgttattcattcaattataccactttggttagtttaaagtagtggttatcagaaaataagtaaaaacaaacaaaaaccataacagtcatactgaagactttgagtaagcttattaaaagtacattgtgttcaggacgttcctacttctaccactttaagcatatgtttcaggctgtattgttacatagtgtatcatccacaacttagtactgggaaaacaaatatcatctacttacttgtggttcggggcagggtttagcagacaaaaatctattcagtgattgggggatggattacctgaggccagaggagccagactgaatggaatacattcagcatctcaactgagagggggggtgtgaaatgatggtaatctcttagaattctgtaaatgaacttgaattctttatattgtggttggatccacaaaagaagaacagagacccgttagcttgagatttggcattccagagtgcagcatctgtccgtcgtatttcattggtttaagcaagtcacatgcacaagatccaggaacacacacatccaggaacagagtagaccagctgtttacagtctttagaagtgatacgacactgaccactttctgaccacagcaatttgttctcttccatgtgcaaattacatatcagtgcatcctcaaatggaattgaatccgtggtatgagagcctcacagctctggatctgcatgtgggattctattgctttggaaacacataagtttaaaagactgcttatatgcccgaaggacaccccaaacacgcagtgtcgagacagagatgagatgatcgtgggcgctgttgttcaaaagggggggggggggagaatatgggctaagaaagctcattcgtcattagtctatgatgaggccagatccagcctggcgcaaatcttgactttcacaactttagaagcaggaaagtgttctaggatctagctgtggcttttttgttagttgttttgtttgtttgtttgtttgtttgtttgtttgttttgagaaggatagcctaggtacccctggctgtcctggaacttgctacacagacttggctgagatcctcctgcttctgcctcccaagtgctgggttcaagccatgcgaccctaccctcagctaggatctagttccttacaagtggtttctaatctgatcattccatatgctgtgtgactgtgtgtttttctttaattgtgcagtgaataattgatagtagattctctccccccctccctccctccctctctccctctctctctttcttccccctcctctctcttcgtcctccttctccaccttctcctccttctcccccttcttcttctttttgagatggagtcttaaatagctcaagcagttctcaaatctgctgcatggctaaggttgacctgactgtgtggccctcttgtctttacctttcatgttatgggattgctgacataagctgccatatctatgcagtgctgggattgaacccagcgtctactgaattctaggcaagctctctacccactgagtcatgttcccaatgctcttgtcatctcttttaaagaaaccatcttttatctaatggataatagtcaaacatgacagttatttttaaactaacagagcctgcaaattgctcgaggggaccatgaacaacagagagatgagcaggaagtataacccaaagcacctatttattacagtgtggctgtaagcaaaatattccaccgaactctacactctggcaggcaagcccagctcagcagcagacagacacaagtaaacacgtccctgggatttgtttctcatctagatggaggcaagcttgtaagagtgaatagtgcctgttatcagcatgaatgataaatgtggactttacaaaaatattgcctggaaactgacattcctttaaaatgtgttatgtattggactccaaagtactgcatgtatggatgtatgtgtatgcatatatatgtgtgcgagggtgcacatgtgtatgtgtgcctgcctgtgaaaggagagaggtcaactttaggtaccattccttagaaactgcacacctcgtatagaaagacagggtctctgaatgggtcacctcaatggtgactggctggactgctgagccagtgagcccagggatctgccttcgtctactcctccagcactggaattacactagcgctgtaccaagcccagattatcctgtgagccctgggaactgagcatgggtcttcatgtttaccccaaaagcacccattgagctgtctccaaaggatgctgctttgattcccaccatacaaccctcatttcatcttcctcacatctccctggggtcatcggccttcgtgcctgttcctttctattctttgcactgtctcaaggtccagttgaaggctagtagatcccacagtgctacagcaaccataccttgaaattagtgaaaatgcttgtctaggaaaaggagattttatttccttcttccatgatgatgactttttctaatatgatattaaaatttacaggacatttgattgctaatttatgagataaaatgatgggatttttttttatgaaatcaagatgttttaggaaaagccaagaaatgtggctgctggggactgatcagtagaccgacctgatgcatgcagagagagtacccgttctttctgacttcagtgagttaccaaatgaaataattaatgagctgaaacaatggaatcttaaagagatgcatttatgcgaaatcaattagatgtcggcctcccagagagctcccaactggcacgattgccaactgatgatacattaaagtgtttgatttgggaaaatttggatagtttttaaattgcacaggatttggcagagttaatgaggagagagagcacgcaatgatccagaaggccgtttgcaaagtacagctcggctcctctcgccacacgttaggtgattaggagatttcagaaagcctgtaggatttgcctacttagcagctgtgtgacctcgaccagaatacaggactgtctgtgcctgcattttctcagcatcaaagccagggtggtagcagatgctgtagactaagataaagcctgtgtgtgtgcttattactaccatacacatgtcatcgtgtatattcgctcctctgtgcatatacctcggctcatgttccagtcagttgaacactgttcaccagtcatgagctagaggcttcactgtgacagaaacatggtgattacctgtttttaaaaaaggcaatttttttcaaagatgaggattagataaactatcataatatgtgagtgtgtgtcaattctgacattcattttatttgtcatggggttttatgtatgtgtacacacacactcatacagaaagagagagagagagagagagagagagagagagagagagagagagagagagagaggacaccatctgctcacccactgaagaatatctttcctacccctagtgttcaggaagtcagggtccactttgtctttagtaaagacgtgaaacatatgccccaccaacatgccaaagcccattcttcagaattctatatgcttctctttttacctttccattggtttttgtcaattgatatctggtacagtttctatctagaaataatatttttgatatattagatcctgaaaaggtaacattttattagaaaataaccttcaacctccatctatattttctgagatgaaaattaaaacaagccaggcttggtggcacatgtctataaccccagtgtgcaggaagatgaaggtcttgaggctagtccatgctacactgcacagagagggtgtagcctgatgtcctaactcattgactatacccatcgttggctcctatcttcagggtcttcctggaaccatgcccattcctcccttgccataccaatgttattactgactcttgctctggcttggtcaacagccaagggcctttgtttcctctaacttataaagcttgtccttgccacgcttgtttcacaaccatcctatgattaattcagaagtgatactggcattttgtattataattactttttcatattagtccataccctttgttccctatctccatcatcagtggctctctaggttcctctccctttcatctctgtccctccctctcgcaatggcccttattccttctttaggtcttgccgcttgaagacttctgatgtctcttcaccccttccacccatggtcaggatccactttgtaataaaatactatttctggggcccagatgaatcctattttttggtggtattagaggttacatattaaatatctcttatatttaaggttttttgactggcacacatttgtccatatttaggagatatgatatgatatatggattcatatatatatatatatatatatatatatatatataatgactagctcagagaaattagcatatgcatttcttctgtcatttcttgatggcaaatatatccaaaattttctagctatattgagatatataagtcattagtgtcaattatatttaccctgtgagacatagaataatagaacatatttctcttgccaaacaatgggatcatacctcttggtcccatgggtccctttcgcctctactccaccaaccctattttctctcgagtctctggtaaccactattagtagtccatgagttttgttgtatagattccacttatgaggaagaccatcagtaacctatttccgtgcctaacttgtttcactaaatacagtgccctgcaggtctatctacgttggcatggtgacagactctcaagcactggggaccattgcaaagtagtggaaacttggagatgtatgggccgtgtggaaagtccttaggccagtgagggtgagccatcagctctcaaagaggactgtaagatgctgatttttttttcctcttcttcagacgtggctcccactccgaggcactgcttcatctgaagcccaaagttgtggagccattgatcacagaagctccaaaagtaaaagccacataaataagtaaatccatgtttgccattatattctgttttaatatgaaaaaaactactaatataaccacagtcttttcattatggtatatgccactgactacagggacccatgggggacttccaacataccacagctatagggtttggcatttgatatattttatatacttagtggtttaataactgtggccagtttgaacaagtgccataactcctatgattcttatttccttatctagaaaacatataggatgatgtctgcctcatattgctttgtgcaatgatgaaacaggactcaaaacagcactacttctgttttccacatgcaggacacccagctctgaattgttgtaaaacaacaatgatatctgttgcccacaaggacttcaacttctgtgagaagcagccaagatcctatccaggacatggatttgcattgtctttcagtcttaagtaaagaaaggagaagggccgagcatggtggtgcatgcctttaatcccagcactcaggaggcagaggcaggcagatttctgagtttgaggccagcctggtctacaaagtgagttccaggacagtcagagctatacagagaaaccctgtctcaaacaacaacaaaaagaaagaaagaaagaaagaaagaaagaaagaaagaaagaaagaaagaaagaaagaaagaaagaaagaaagaaagacaccagggccaaaaaaatgggaatgnnnnnnnnnnnnnnnnnnnnnnnnnnnnnnnnnnnnnnnnnnnnnnnnnnnnnnnnnnnnnnnnnnnnnnnnnnnnnnnnnnnnnnnnnnnnnnnnnnnnnnnnnnnnnnnnnnnnnnnnnnnnnnnnnnnnnnnnnnnnnnnnnnnnnnnnnnnnnnnnnnnnnnnnnnnnnnnnnnnnnnnnnnnnnnnnnnnnnnnnnnnnnagaagagaagagaagaaaggagaaggacaaatttgctttggacaaacttgtccaaagtttcaaagcaaatttgtcctctgtagatcctcagttcccacccctgatgcaatggtttataaccatgacttcccagaataacctgggggcttcgaaaatagatggatgtgcccctccaccctcttggggtacttttacattataacatttggaaagaggccaagcttagaaacaactagaggagcccgctgggcagccaagattgagaatggctgatggaaaatgtgccagtctaataaacatagtttgaatttcatggtttaagacagctccaggttgctctcttccctagctggcttgtcagcctgatttttgcccacttcaatttaatcctatgtatcaacattattctctctggaaccagacaacagcatatgtttgaaaaactcatggattcctggactgtgaagcctgggtagtatttatccccgtgtcttgattgtctagcatgtagccagaaggagcagggagctgtgggttggtgtcaaaccataaatgactcctgagagctacctgtcatctccagaccgaacgtaatttcagcagacttcctggtgcagtgtcagcatgagctggcagagcctaagaggaaaggtgtccctcgtcaaaatagtgcctttccccagctctgccctcagcaaatgcttacttacatcagcattctccagctttaaaaatgtgacaaggaaccgtttttcaatgtacattcattgagcagaatgtctgtgtgtgtgtggggggggggnnnnnnnnnnnnnnnnnnnnnnnnnnnnnnnnnnnnnnnnnnnnnnnnnnnnnnnnnnnnnnnnnnnnnnnnnnnnnnnnnnnnnnnnnnnnnnnnnnnnnnnnnnnnnnnnnnnnnnnnnnnnnnnnnnnnnnnnnnnnnnnnnnnnnnnnnnnnnnnnnnnnnnnnnnnnnnnnnnnnnnnnnnnnnnnnnnnnnnnnnnnnnnnnnnnnnnnnnnnnnnnnnnnnnnnnnnnnnnnnnnnnnnnnnnnnnnnnnnnnnnnnnnnnnnnnnnnnnnnnnnnnnnnnnnnnnnnnnnnnnnnnnnnnnnnnnnnnnnnnnnnnnnnnnnnnnnnnnnnnnnnnnnnnnnnnnnnnnnnnnnnnnnnnnnnnnnnnnnnnnnnnnnnnnnnnnnnnnnnnnnnnnnnnnnnnnnnnnnnnnnnnnnnnnnnnnnnnnnnnnnnnnnnnnnnnnnnnnnnnnnnnnnnnnnnnnnnnnnnnnnnnnnnnnnnnnnnnnnnnnnnnnnnnnnnnnnnnnnnnnnnnnnnnnnnnnnnnnnnnnnnnnnnnnnnnnnnnnnnnnnnnnnnnnnnnnnnnnnnnnnnnnnnnnnnnnnnnnnnnnnnnnnnnnnnnnnnnnnnnnnnnnnnnnnnnnnnnnnnnnnnnnnnnnnnnntctgctgttgttttatttgtcatttttggcttgatgttttgagttatgacaaggtctcactaattatgcgtaagtgacctcaaattcgctgcaattcccgtgtttctaccaactgaatgcaaggcttatggctgcacaccagcatcagtggcttagtgctttactttaaaaaggacaattggatattttctcattatatggtagtagcctcttgctataaatatctggaaaactgcagtttaaaaaaaggcaaatcatctctctgtggctatttaaaaggtttggacagttgatagtccatgcataatttatacacacaaatggatacacaaacacacacagatatacacactcacatgtgcatacacactcgctcacaacccccccggccccccccccacacacacatacacctacacatggattcattacacaggatacagctgttcctctggcaccacaactcaccctgcatggattccctggagaaattttaactctttggggtctattatttcaggggccctgatgcacctgctcctgttttacatcatgcatcacttctattaagagtctttatttagcaaatgcattaaatattaatgcaggaaatattatgccccactcattcctttttccctctatcttcttttacagtattcagagggttgattttttttacttatatttggttagtgtcttcccttaaagctgttcctcatatggggtatgcaggcaggacagttgctaagtctctaaatatctacaaatttttctctgttttacccccacatgtgaagttcttgtatgggcacaggattcttggctatgatctgcctactgggtggaacttagtgttgtggtggctggctccttgccagtcacatatgaatttctttctgagtcactccatcccttcctttgaccagagacatgtaagaatttcaatccttgatgtccagctgcttcacaaaaggatctaggtctttctctaccagaaaatgtgcctctgcttcaggtgtgttttcagatttgctttgctttcctttctttctttcttttttttgttttgttttgttttgtttgtttgttttttagatttatatccttcctgagttggacagattttttttcttccaatgcagtgattagctgaatattccctgtgcttaggagattatttgtttgtacatatgtaaatattatgaatatatgtgtattcatgtacatgtatatatgcatgcacatagatgctttaaaacacttcaacatttggtcttcaggctgtgtcttagttatgatctccatggctatgaagagacaccatagccaaagcaactcttacaaaggcaaacatttaattgggcctgactggcagtttcagaggattagtccattaacatcgtggcaggaagtatgacagtgtgcaggcagacatggtgctggaaaaggagctgagagttctacatcttgatccaaagatatccaggagaattctgcagggagccaggtgcaggctttggatcacactggccagatctgagcatacatgtgagacctcaaagtatcacctccacagtgacacacttcctctaacaaggttccctatccttgaataaggccacaccttgcatgggccaagcatattcaaatgaccacaggctgctagcttgaacctgaagcaaggttggagtgtgcattaattatttgtctacgttcatgctgaagtcctacattccatcccaaccacccctctccatcttggagaattcacatgtggttgggtcttggcttctggcttctgtatcatcaggtgcccactctgtttgtgttaagccatctttccatccctctggtgaaaacctaagacagtcaatttataaagaccaaaaaattatctcaactcacagtgttgcaaagtgtgggccgtgctcaggtggctctaatgtttagaagcttaaggcagatatataggactcagctgttggatgggcagtagaaccagaaaggggaaagactgtctcccactcccttcaagggagatcaccaagatctgaagatctctcagtaggccctacctcctcatgtctccctctcctcccagtgatgtcaactagacctagacaataacacatgagattctggaggacactcaagactccagctatggcactgctcaaacatccataccttttgtgttggatctatttaaatgtatgggtgcttctctctatcagagtgatgatggcttttgacttctatcagagttctgatggcttttgtcttttatgtgtcgaaaggtaaagcttagaaggctttcctgggcaagtggagaatgcttgattcccactgggattccttcttctcagccccaggcctgggaatgctgcctccttcttgttgcctgccttgcttcttgttaaacaaacatctctgggtcattcaagtgaggtgaagacaaccctcaggtgcctttgatccccagactttaactctgctgctgtgggattttttttttctgagaaatgctgtctaaagaatcaaccttttacccacccaacctataaccaagttaataatgtactttgagatatttacagctgtctactctcattctgcttaaatattctgtaggcaacctgttcagagttaactgtcttctaagaaagacattgtaatcagtcctactctactgtgaacttccaatgtcattaactccttcaagctcagcagatgtacagccttggctgtatcacattgcctactttccccttgtgacccgtccccatctcgactcagaacaatgaatgtacatgagtgagatgtggtgaccgagtctaaaaaacactcgctgtaagtaacgaggcattgaaagagcctctcccacacaaaatacgttggaagcaacattatagtgtgtgataagaccagagtgtggctttgtgtgctgtcctcaatcagacaggaaaaatagctcgcgcgcgcacacacacacacacacacacacacatacacattcccttgagacacttgtaaaaggaggacagagataaaagttccttattgtttttgttatcgcatttcctgtgctgttgttcattgtataaagaggctggctttccttctggactgcttttacttcaggttttcttagactagactctttgatcagaacagaccaaaacactgtgggataagtcagacctactctaaggcaccaagagtaagtctttcttctttcatgctgcatctccatatgatagtcataagttttccccctagcctgaactgcttggcttaggagactcaaataaactctagctcaggaaaaggtatccaaaaacttgggcgtaacctctttcccaataaaatggctctgtaggcagagctccaggtctgagagcagccagagcttctaggcctgccttgccccagcaagctgagtatcatcagctctcccgagtgttgtttctttgtttttgttgttcattgttcttttgttgcttttgttgtttttgttctttcatgtccttatttacaaaaagagaccggcagctctctagagtatcttctatctatgggattctcatttagttatcaaatcttaccatcttgattctataccatacttcatgatgaagggataaaactcagtggctttcccaagtgttctgtggagcccctgggttctctaccggataatacagaaagggtcaaggaaatgttaagcttaagattttagggccaagggaaatagctctgttggtaaagcactttccttgtaagcatgaggactgccttagagttttattgctgtgaagagacaccatgacatggcaactcatataaaagaaacatttcattaaggctggcttacaatttcagaggttagtccattattattatggcaggaagcatggcatgtgcaggcagacatggtgctggagaagctgaaagttctacctctggatcctcaggcagcataagagacctggtgccacactgagcatagcttgagcataggagacctgaaagccaaaccccacaatgacacacttcctccaacaaggccacacctgctaatagtgcctctcccttgggccaagcattcaaacacatgagtctatggtgaccattcctgttgaaatcaccacaagaatgcaagttcgattcccaaaacccatataaaagctggacatggtagcacatgcctgtaataccagcactagtaagatggagttatattactagtgccctgaagtatgctgaccagctagccttatatacttccggaagttcccgtcccatgagcaacactttaaacaaaagtttgaagacacctaagaagcaacacctgaggttgtcctctgaactccacacacatgcatgtgtgtacatatatgcaaacatgaacactcacatatgcatacacacctctgcctagagataaaacagtgcatttccctattttttgtgaaggataatttcatttataaaggaaatgttcttccatatatcactggcaagagagctaaccctgaagacaactcctagcatctgagtgactcatctcctgtaggcatagcaaggctacccaacctgaccacacacttcctctgatcattttgccctaaatgtcttccttgtctaagggctccagcctcatttttactgtctatgttaagatgtataaaggccttactcatccagccacatcaagtctcttttcttcctggagaatctgtcttagctacttttctgttggctgtgacaaaataccccaacaaaattaaattaagaaagggttcattttggctcatagctccaggatatggtacatgacaacagggatgtcacagtggcaggaaactgagccagctgctcatgttggtagcatccacatcaggaagcagagaaagatgaatgctaatattcagctcacttttctcccttttgttaatcccaggaccctaactcccagaataggagttactcccagttctggtctttgttttaaattgcacaaaagaatgcaaggggagtaagctcaaggtatagagccatgaatgaagacagtacaggtggtagcttatattttatttgtgccaaatatgttttgttaactaaaatttaaaaaataaaggaactttaaaaatactatctacgggatattgccaagcacaaaaaggtatttttgtgtgtgtgaaaaaggaaactgcaaccaatttgtgtgaataaatattgaccaggctgaggggtgggatagcaatctgccccatgcagacagaacctacccttcatcagtatgtggcaggcacagcatagggccaaagttgaccaggaagagttgcttatgtagaacagaaaaagctataggcctcacaatgtgggttcagcctcatgtattgtgtatgaagcctcatctccctatgccctcacttaaaattcacactccaagtgggggatggagagggggctcagtgattaagaccacttgtgctcttccagaggacacatgttcagttcccagcacacatgtcccacagcccacaaccacctgtagttccagctccagggcatctggtatctgtgtctggactccaccaacctctgcatacatggaacacattggctcacactcacacagacaaacacaaagaaacacacacacacacacacacacacacacaataaattataagggggaaaaaagctcacataccaagacagcaaacaaggagccaggggtctccctccccaactttctcattaggcctttactaaaaggtgtttgaatctgttaattacacccctacacatacactgtttgttaagggtgaagttaccctaggctctgggatactgagaactttgagagtctggggtaagtgtcacaaccttaacctctactaacaggctgcaaggcagagggtgtcctccagtacccacaggatatgaaactttggctgctggccagctctgggctagagcacactgctgggtgactgtgccagacaccttttttttgctgtcagctgtcacaccagctccttggagtattagacttttaatctttgatctttcttctccaccaggaggtttttcaggaaccactgcttagatcctcatttgaatcctcatttgcatgctcgtttgcatgctcatttgaatcctcatttgcatcttcatttgcttcatcaactcctcccagtcaccaaatcctttaaaaataatcattaccaaccacagatttttatcaagataagcttaatggtgcacttggggcccattaagacctaagccttattatctggctggctcttctgaaggtatttgtgtttgaggtccatacaaacatggaacgtcagtaacaatagaccagttcctatttaagataagaactgtctatctaaacatagaggggaaacaaatactataatattgcagtctcagacctggagataaaatcatacctgggtccacatcactcagtctaccggaaataaatcttatcaagattacatgcttgtaagcaaagcctgcattttacatttctacttatttttatacagaacatttgttctgttctctaaaataggttttaaatgagacgaagtaaattgtaaatgcccacagtagtttcaaggattcctgttgacattatagaaacctttcaaagttaagtatagtctgtatttacaaaggaaggagccagagatctgtgagattacaaagcacaatttgtaaatgagaagaacacttggtcttccgtgccaaatgcaatgactgaatatttttcactgtctctttaaaagcaaaagggaagtaaatttgtattgtgttatcaaaattcttgcacattgctggattgcacagggctcgaaaacaagagtgccttctacgtttgtgtttctattctagtcgtgaaacccagggaatttcacacatctgtgaatatctgtcatggaagcacttgccttttacaaaccgaatacataaagtttaaaaagcttatttataccaactccaaatggcaaacatttaggtttctctcttcctttgtctctgaatatttttcccagggtcaacgtctctttgagaagttgctccagctgacgtcgcaaaacatcgaagtcaagctggtgagcgacgtgaccgcagattcaaaggtattagaagccttgaagttaaagggtaaggccaaggttgatgctactttaccatggacattctgtgacaattccttgaatttcaagtgaaaatgatgtcatttctctcatcagtacattccacttaatatgttccttagttctccttggacaaacaaaaaacaacaacaataaaaaaaaaaaaaaagcctgattaaagcccctgagagaattaattaaccagtgctactgggtgtgtagaacagtgttttgtatatcagtttataagagataatccactatcccttaaatgatatttcgttaccgaagcagtccttcgacacacatcaataatttgatctgaagaaaaagaaggaaagagccacttccagggaatcaagtgctagttcctgtttctctctctcccagtccactggaaatcctctttgtgttatgcagtcctcactgcagttgggtctggagatatttgaagcctgtggtttctgacttcaggacaatcccacagaaaacgacctcggccacattgagcttcatcctggaatcttttcctggaatcttctctagctggactctcaattccaaatatttttagatattttgtttaagaaaaaaatcatttatacagcatttcctatgcaaactgctaatctgtgggaaagatggacacatgaaaaccaataagcatgcacaggctgcaggaagataagcaggtaatatccacagtgagtcttcatgctttacctggtggcagaggacctcgggtggctgctgttagaacatagtgcgtatgcttttttgtcgctgtccctacatcctgacatgataacagtttctaaacctaggacagatcgacacaattaagtgagcccaagtggcatcagacgcgttgaaacagggaaataaaaatatccatcacttccttgtgatggctagactgataatcatccttatatagtcagtctgccttacatcgctgtaacaaaatatcccaaacgaacttagtaaggacacgttttactttgacagatcactgttttgtcattgagtctattgtcacttgtccctgttgcctgggcctttggtaaagagttcagagtgggaggaagcttgtgggagaggagcctgtgcagcttgaggcagctacaaagcatatcaaaacaacagagaggaaccaaggtgctgatcgccccttcaagggaaagatttcaggatgtagctaccttcctctaggcctttaggccacataaaggctccaccacctttccatatagcagcacaggctgaagacaaagcctttctgacatgaggctttgaggaacatttatcacaaaacctatcccatgttattatggccaatgttagcatcttgtttcatcttgttttcgtctttttagatagaacctcactatagagccctggctgtcctaggactcattatgtagaccaaaataacctcaaatttgtcgtgctcctgcctctgtctccagaatgctgagattccagacatgagcaagtacacccacacttgtttaagttgtttttccctctgtgtgtacagaagtttaaatatgtacaagatattgctgaatctcaaaaattttaattatcctttttttcaaccagctaaactgttttaaaactagtcaatacccagtccattcagtgtggctctgaaatgtgttgttacttttcttatttgaaaatgtcaaattgagtccctgccatcagaacatttcctatctaacatacactttttaggaagggattcactttggttaactgggaggtgtgtgtatgggggaggtggtggtctggggctacatttttagtttgcaggatgtctttctcagtgaatctgcttgcatctccttggatatatacatggaggaagaggggacctgagagttaccatggcttcctaagtgtaaccctggccgaatcttgtaaactcaatgaaaagttaaacccgggaggcattaggggagcacatcctaggcattgctgaatgagaattagcaaagctgttgacaaagacctgctttccttcctgctgtgaatggaggtctaagctccaggacagtcactgtgtctcagagaaaggaagctgtctgacctttcaagtctatgcaggtcctgttcacaaaaaacatttctatcacaacaagaaaataattggtttgcttttacattggtgaatcaatagtacccatgtacctggagttaggcatccctggcttttagtaggtgcttcatgtatgtatagtctcagtccaagatatgcaaagctttaaagtccaagcactactgatctctactatcaccccttagtagacacatattaaataattgcctcctatgccttagaaatagcttttacaaaaccatctaacatttgtttgtttttcagtatcttgcttgagaaagagctttaacctttttagggagaaattagtccttcagtacagttttttaaagttgtgcccaaatatacagaaagctacacaaaaacagtataaagctgtccatgaagaaatgcagttgcaggggtgttacagaattcagaagaaaatcaaatattctgtgaagaataggagaatgaagcttgccaataagggatgaagaaagagatagacagatagatagatcatggttaggtgaatggatggatgggttgatgggtgagtgggtaggtggatggatgggtggatagatggtgggtggatggatggatgaatgaaggatgggtgggtgaatggatgatggttgggtagatgaaacaaagacagtatcatagcttatgctgctctaattaaatgtcagtggctgacaaatttataaagaacagaaacatatattctcatagtatagagtctgaaatttcagcatcaaggaattcaatggtgtctggcaagagcctcttctctatttctaaagtagatccttctgtcagtgtccccctgctgtgtcagcatggggaaaaagataaagtggtagacatcacatagcaattcccaaaggccactcactttttattgccaccacaagaggataaatatctacatgagaattgggggaaattttagatcatagtcattacaaaaataggtaggtaggtaggtgatgatagatagatagatagatagatagatagatagatagatagatagatagatagacagactgtgactgataagtcttcatatcttgctatgaggttttaaaattaaagtcccaggtttttcctcttttattctttttgctcatattgtcttctttaaaaaaaacaattctgagagaggtttcactatgttgcccaggttgaccctgcattcttaagctggagcaatcctcctgtgtctggagtagctgcacgtacaggcatgtaccactgacctttctcaattctatgatcctttgttgtaaagacaatgcatgtgtgcttgagtagactctccatcaccatgacagtgctcaaactctgtatcctctgaatcacatcatctgtgtcttttgtgactaagatcttgttaggtgattcccacagatgccagctgtggtttgaatggagctgacatttgggacttccttcactagcatgtgagttcagtagacagccttccctgtgctgatgaacaatagacagacaaggaaccctactgaccactggggtatcttcaagagcagacattccattgacatttattcatgatcataattcatctgcacctgttttccgagacagtgtagcctagactggttttgaactcataatgtggcccaggctggcttagaactcacagcgctcactcaacctcagcctcctaagtattagaatgacaggtatgagctacagtggctggctttacagcaaaaatttaaatgtgaaacaatgctaaagtccttttaccaacaacaacatgtttattagttactatgttgtgactttctttttgccatttatttaaaaagagaagcattgaatttctgttatctaattccgagaaccatccttgcctttacttatttgaatccaaggaatctgtattcattcttccacgataactcgctttcatttttcacacccactagctggaattaacaagacatcagagaaaagcattctatgtctgaggttgacgttcaaactttaacattaataaaggttgccatggcttccgacttgaacattttacagtggcgttttgagccacttactccagatgagcagattataacttaagacgccgtgactactgacgtagtgtgtgactcggctcgtgctgatttatcattattactaagtcctgctctcaggtaggcaagcgaatctgtcttaacttcacattagtattgagaagtctatttcggaagtttccttagaggtcacaccatggtattccagcttcccccatctggaagcttgacaacgggaaggaacttgaaggtcaaagtggtccccctgctgctgagaaactttattccaatgttttctacatggtgtggaatccttgaaatgaagcatccaccatgtcttcaatctctcccggcagtgacccaggcaaaggtcacgatgtcctgctgccacctgtgggtaattctcggctggccttggctctcatatcaccctcttcaaaggtgatgctgattgggctcatgctataggacataaagcttcaaaggtgatgctgattgggctcatgctataggacatgaagctggcacctttgtttcgtatctgccagttagcattcaaagagctctgttttcctcttttcttcacagcacactaaatatttagtggagcagtgaagaagcaatatctactccacttgtatgcatctgcacacactatactctcctgctatcaggcaatgaccagcataacatttagacacaggtccttctgtgtcatacacaaaaaccatgctgaaatgctgggcttgccgttaactgtgaagtgaaatattaggtaatttttttttctgaacctcggtgtccttttcaataaaatggtgacaatagtaacttccctgaaagttatgggagttaaacaaatgttatttgccttagccattagtgtaatttgtaatatgttactctagtattttgtgtcttagttgatactgcttcatttctggcttacaggttctgaggttcagtccattatcgtgtcatggcaggaaacatgacagtgtccaggcaggtatgatgttggaggagctaagagttctatatcttgttctgaaggcaaacaggaaaagactggcttcccagaagttaggagggtagtctcaaagcccaccttcacatgacacacttccttcaacatagccatacctcctaatactgccacctctggcccaagcatactcaaaccaccacataaatgtttgctaaaagaactcaaggctgcctgtggaaggtcacagaccctttgtgctcttacacatcttcctggtgtttgtaacaccggtgctgtgtccatttgccaagtttaaaatcatgagagttgatagagctggacaattttatccaatgtgataaaggcctggggaacttcgaagggatagttttttttctgtgataagagaaatctagtaactagtgatgccctgcagttgcatctttaagatgcttctcagtgactgacctagttgccagatgatgggacaagcatttggatgcgtaaatgctgtatgcccctgcaataatgttgatgctgacagtcttccttgtatgcatgtgttaaggggtgggtcctggtcctcagggtagtgttattgggaggtagctcctttaagaggtggagtctggctggaggggtgggatatttgagtcacgggagagggggggcaggagggataggcctttgaaggggaccatgggactctggactcttccccagtctggcttatttcctggccaggagagcatcagtttttgttctgccacaggctcccaccatcagacaatgagacaccacatgacccaagtggagtgattagatcatgaactggaaccaaccagaactgagaaaagtaactctgtccttctcacaagttatctgtcttatttgcttgttatagtaacaggaagctagcaccaatgctgactctatggaaatgcacatggtgccttcctcctaacagaaaagggtggcagaagggttgttgaagttcaaactactttggcttgccagtattttttttaaataagtccctgtggagatcagagcggagtgcctttccccatggtcacatgtccaggtggatgggcaggaagtcttgcagtttgctgaggtgtcagacttcttcatccatgtggctaattaacagagacaggcagaggcatggagtgactcctgaacagaaaagcttaagagcataaatgcttgactgtttcccttctagggttttgctgactgtcgtttctctttggaagaaggcttgaagcttttttattctgctatggcagaatactcaaagactgggtaattttaaaagaacagaagtttctctcaatttgagagggtagggaatttaagggcaaactctaggcagggaatgaagattttctttgtgtcatagcagaaggcaagaaagaccaaagagaggatcttgaccttggtcaagaatcacaagtggcctgcattatctaatcacattttagaccccacctagttgtaataatggccattaagctctatgcattttgaaggggccacagctaaaccccactgatagggaaatggagatgtataattttgtagaattattatgaaaagctgaacttgggttcatcttgagcaaaggtcacatgcaaactatatggcaaaatgtaaaataactaataactatgtaattgtttcattgtaacctcatgaacagacagaagacaaattattgtacagcatctgcttttaccagagttatgacaacttggcagaaagtagcaagaccagaggtatgtgagtggtggtggcattttgctagtaaatggtcatgacctcaatagaaatgaacttaaggtgggatatttcttcagccaacctattgttttccagacctgttttcctcaggttgccatagcagctgctgtgcgaaaggttcacaagaaaattatacacaatagggagccagtcatcccatagagaacatgctgaaggataccagtcagcaatgtgggaaatgctcagatgctgttgctaggagaaaagtacctatctgcaagatggaagccaccgtgtcatttcatcctttcaggaatggctttagagtgttcatatggccaggcgtggtggtgcacacctttaatcccagcacttgggaggcagaggcaggcggatttctgagttcaaggccagcctggtctacaaagtgagttccaggacagccagggctatacagagaaaccctgtctcgaaaaaccaaaaaaataaaaaataaaaaaaaatagagtgttcatatggttgtctgtaagtgatgagatcacagctgcttttgctctgtttgtgtgtgtgtgtgtgtgtgtgtgtgtgtgtgtgtgtgtgtgtgtgtgagatggtggtggcgatggtaatggtggtgatgaaggttaagatgatggcatagtgacgatgataatgatgatggtagtgatgatagtaatggtggtggtagggatggtaatgctggtgatggtggtaggataatggtggcagttatggtaatggtggtaatgatggtggtggtggtggtaatgatggtggtagggtaatggtggtagttatggtagtggtggtagtggtggtggtggtgatgatagtggatgttggtagtaatgatggtgacattggtaatgaatgctgcggtggcatttctaaggaagtgtaaggtataagaccaaaagctcagattctagagaggagaatgtctctggctttgctcttgtggaactctaaagtacttaacatcttaaaacctgtctcctaatttctacattgactaacagtagtaggtgctgtataatgctatcaatgagataattcacaggatgtatttaatatgatacctgttaggaactttaaaaaaaaattcaaaaccaatttttttctggttttttgagacagggtttctttgtgtagccttgcctatcctagaacttactctgtagaccaggctggccttggactcattgatccacctgcctctgcctcctaagtgctcagatttaaggggtatgctgccactacttggctcatatatatatatatatatatatatatatatatatatatatatatttttttttttttttaaatgaggatttttagctcggcgtggcgatgcatgtcattaattctcgtacttgggatgtaaaggcaggaggatctcttgtgaggctgaggccagcatagtctatggtaagtttcatggtaagtgtcaggatagccaggaccatatagaaagaccctgtctcaaaaccaacagcaacaacaataataataataataataaatattaaaattacaaaaatgagcacttttataaaggggaaattactaggaaaagagggaagaagaaagaagaaaagaccacaggggagaagaatcagggtggacactggtctatgaatggtgcctgaaagttcccaaatggtccctgtagagagggctacagtgctgagtgctacaacaccagaacagactcttgatcagcacataaatccttgggacttgtggccagaagggcagctcagcacccctcccctgctctcctgggaactttcctcttagattcaaaagagtttcttggctaaaatttctagcacataaatattatatatgaatcacttaaacctccagtgacaactaaatctttcctgcttcacagaagacaaaacctaactcacaccccagccttgggttcgtgtctgtacttttttgaggccaaattttccacagggagcctgcaccttggggctgcacacagtgtgaagaaaagagggacctgattggagactgttaggttcactaaagatgctgatgaacaaaaatctgttcccacacaaagctgaggagaaggcgcatgcggccttgggagctcagcctgagcctcttagtctccttacatgttctcagtgcaggccattcttaactttaagttaacttttaaaaggcttttccttcctttttccccccaaatctacactcagtgctgtagtggtctgaggaggaaaaaaacaaaaatatctcatgtgttattggtaattcaacagcataacattcacttggaagaattcttgagattcctgtaataattgattttcatatgtgtgtgtgggagagggagaggaagagggagaaggagggggannnnnnnnnnnnnnnnnnnnnnnnnnnnnnnnnnnnnnnnnnnnnnnnnnnnnnnnnnnnnnnnnnnnnnnnnnnnnnnnnnnnnnnnnnnnnnnnnnnnnnnnnnnnnnnnnnnnnnnnnnnnnnnnnnnnnnnnnnnnnnnnnnnnnnnnnnnnnnnnnnnnnnnnnnnnnnnnnnnnnnnnnnnnnnnnnnnnnnnnnnnnnnnnnnnnnnnnnnnnnnnnnnnnnnnnnnnnnnnnnnnnnnnnnnnnnnnnnnnnnnnnnnnnnnnnnnnnnnnnnnnnnnnnnnnnnnnnnnnnnnnnnnnnnnnnnnnnnnnnnnnnnnnnnnnnnnnnnnnnnnnnnnnnnnnnnnnnnnnnnnnnnnnnnnnnnnnnnnnnnnnnnnnnnnnnnnnnnnnnnnnnnnnnnnnnnnnnnnnnnnnnnnnnnnnnnnnnnnnnnnnnnnnnnnnnnnnnnnnnnnnnnnnnnnnnnnnnnnnnnnnnnnnnnnnnnnnnnnnnnnnnnnnnnnnnnnnnnnnnnnnnnnnnnnnnnnnnnnnnnnnnnngggagagggaggtggagaggaccacctgtatgtgagtacccatagaggccagaagaggacatcagatcctctgtatctatagttacaaggtgtttgtaagctgtccaacttgctttggaaccaaatcaaagagctggaaagctggaaagctgactaaggtgcttaattgctttgctgtacaagcatgggggcttgaattcagatcctcagtctcatgaaaaagtgggtcacagcagcacattccttctgtcccagtgcttggggtgggcaaggcaggtgggtacctggagctcattggtcagcctagtggatctgtgagcttcaaattcagtgagaaaccctcccaaaaagcacagtgggttgtgactaaggatacctgacatcaaactctggtctccatgcacacacacacatacacacacacacacacatgcagtctatggtcctacttatatataatctaataattttataatatctgttgtgacattttgcaaagcgcagttgttgactttcagcaagactagctagtaaacaagggctggcactattcccaggtcccaagtaaagctacatcaccatgataagctaagatcctctagaccagtggttctcacagtcccagtgctgtgagcctttgatacagttcctcatgttgtggtacctccccaaccataaaattatttttgttactacttcataactgtaatggctactgttgtgaattataatgtaaatatctgatttgcagggtatctgatatgcgactccatgaaagggccatttgacccctgaatgggtcacaacccacaggttgaaaaccactgctctaggagcttcagcaatatgttaaatccatccatccatccatccttccattcatccatccatccatctatccatccattcatccatccatccatccatccacccacccatccatccatccatccatccatccatccatccatccttccttccatccatccatccatccacccatccttccatccttccatccgtccgtccgtccatccatccatccatctactaattttaggaatatttattgcatctctgcaacatgccaagctctgttggaaattatctgaatttttaaagactattttggctatttgtagagggtgtgctagaggagaattgaaggaggaaaaaaagctagtagagtgtgggtgaaccccaggcaagagacaaaggtgtcctggagtaacacagacagaaggaaatacacatacatattcaaaagtacatattgggaatatatatatagagaggggggggacagagagagagggagagagagaacgcaaggggggactatgagagaatggttagaaatgaatcaagagtaactgtcagagctttcctatgaatgacagggtacaagctgtcaacatctcctgacatggaagtttagtaggagaaatagcttgccacttgggacagatgcagagcactgtctgatttagtaatctcagctttgtgcttcctacacagccaagcagagagattgattaaatcttacttctgtgagtttaaagtacaaagaagagtcaggattagaaatacagtctgggaagtcaccagcctctagatagtatttgtagccacagaactggataacactcttgcttctgagacttaaaacatatggagaattaaaataaagacaaaaatagggcaggacagagagggaggcaaagagtttgtgctagtgcgagtttgtgccatgcccatagtatgtagtaggtactatggaagtattaatttaagtcagcttcattaattcaaaaacatggttatgaagttcatagttactactgaatgattgtgggttagataattggaaaactaattgccagttgatgcttttaatattttagtcattatactaaataaaaattgtctaaatcctcaagctgataaaaaaacaagctgaattaatatatgtgcatatatctatatctatacacatctcaccttatattttaggtcacagaaagtgtggcagagaaatgagtgggaatgtctgacatgtgatatttactacagaaaaactaatacacttaccctaataccaaatggtgctttcatttgtcattatcagtagcaaagcagtctttccataaaaattagacagcctatgcaacaggaagctgtaactatcctaattccataatgaagaaaaagtgtcgaacagtgaataacagaagctgtcagaattaaaaggagacacatttaattagaaatctgaaccccaataaagccacatgaaaagtcaatacagagctaaaggcttgagcagtgacctaagtgatgcatgcagaactcttggacaagtgcacattctttccaactgggatgtcctaaaaagcagaaaatgatgatatagaaagcaaattcaacacatatcatagaattttaattatgctaaatatgtcctttgacttcagtgaaatcaagctagaaaccaatagggaaaaaagtatgtatatatatatatatgtatatatacatactgttcaaccaagacctcagaatagaaataaagaatttttaaaactcttccatgaaacaatatatcaaaatttgccccctcctctctgtaacctaatgattaacatgtgatacagcagctacatgcataacatttctattatttttaaaatatcaatgaagtaatgttaccaatggctcttatatttaaaaagatttttaaaagggggggggtcggtgagatgtctcagcaagcaatggtgctggctgtcaaggctgatgatctgaccttggtccttgggagctctgaaaactgtcctgtgacctgcacacacttgccatggtgcacatgcattccatcttacacacacaaaataagtaaatcactgcaataaaacaaaagttaaggactggagagatggctcagcagttaagaacactgactgctcttccaaaggccctgagttcaaatcccagcaactacatggtggctcacaaccatctgtaatgagatctgatgccctcttctagagtgtctaaagacagctacagtgtacttacatataataaataaatgaatctttacaaaatatttaaaataattaagacaaaaatggagattgacattttgtgtgtatgtgtgatttgaatgtacttgattttggataatttaacttctggggctttatttcctcctacataaatgtgtgtgtgcatatgtatgcatgcatgcatgcgtatgtgtgtatgtgtatgtatgtacatgtgtatgtgtgtgatatgtacataaataaactgatataaagcaatttctttaaagagccctcataactagcctggaaataaatactgagaatcagcaggatttgaggcaggtatggatgccagtctgagtggcctggtgggcatgaaggctggagaaacctctacctatgccagctacatgtccatctagggaccccttgcatctgccaaacatcttgaattattattattatttttgtcctgcagagctggtttccaagcagctaactcaccatagctgacatagcagcagattctagcaaatcaccttatctgtcacacagctcattgaaataactatgctgtcaggtctgggatgctgctgggagatgtgctccaatgagattcgtgaaagctcggctgtcacttggaaatgacatgtgctataagaaaagaacatcgtgttcaggtggtttgctagtgctgtttaagttttaggttcttgagttgaaagaaaacttagagactttctgatatctttataactcctggggactcttaaaggtaatgtttgtttgtctttatttttcttttctttccttaatatgattggatattgcattgaaaaagtaactaataaatgacttagttagggttttatggcttaaagagataccatgaacaaggaaactcatataaaataaagcattttaactgaaactggcttacagtttagagacacagtccattattatcatggcaggaagcatggcagtgtgcaggcagacatggtgctggagaaggagctgagagttctacatcttgatttgaagacagccaaaaggagactgtccttccagaaggagactggaattgcacactgggtatagagtaagcataagagatatcaaagcccattcctcacaatgacacacttcctccaacaaggctacaactcctcatagtgccattccctgcaagccaagcattcaaacacatgagtctatggggccaaacctattcaaaccaccacatacagataacattacccaattaatgtttttgcacatgccatttgtctcctgcaagcgccatacacttgtctatgtgttattgtcagatggagaccacaaacagcttaaaggaaaggaaaactggtgtgaagaattacttccctctaatgattcaaaagtgactggatactatagaaactattcatgttatcttacagatgtgggaaactgaggctagagttcagccacactgggaaaggtatgcttgtgacccagtgggtttcaaagaagttcctagtttgcctgatctatagtgactgggcaacggaaaaacagcagctaagtcctaccaaagaatgctaatatgcccaaactgtaacgctatggcaggttcataggctatgttgcatgtactagtgtgtgggaatctaagagtagccttcctcagagtaatattagtagaataaaaacgtaagcatcacaatgttagtatgtcgcaaatgctgtatagcctatacttctaggaagtactacaccaatgcttttgctgtttatttgaaattctaatttaactgggagtttgttttattctcctccatctggcagtctggtctgggatacaggcagagtacaggtgagccatgatgggtgcccagctagcaaagaaaccaagaaaatgggagctctagtaacagaaggtgactctaaacccatggtaccaacatggaaaagattctgggaagcctaccaccaggcagggattcaaggtttgtgtgtgtgtgtgtgtgtgtgtgtgtgtgtgtgtgtgtgtgtgtgtgtgtgtgtctttatcctcgtacccacaccaccatgagccagctggacatagcaggagaacccttccctttgcatagtccctggatcacctctactcagaaagtcgaagccgtgctcactatttggacaggacacagaagaattgcttccctattctggagtatgtactgaagagcagactggaacaagaattaataagttattaaccaccaaatgaagcctttttctctcccggccacccttggaaatatcttttatttacctgttctatgaagtccctttcctgtgacatgagatatgatggatatagtgcattactcatgtgcagttttttttttttgcagtagataatgatatcctatttttggtatttgtacatcattgtggaatttggacatttctttgcccaatcccctcagaatttctttttcttcaagaacttggaaggaaagaatataggaagtaaacttaggggattctcctgaacttttccataccacaccacacaagctccgcccctcactttaacggtgggaggggctgttgcctgccagttgtgaaggagcggtaataacaaccttgctgtgttctggcttctatatttttagctgggatatcccagctgtcaactagaaagttcagttgagtgtagcccaattctttctcaatggtttcagcccaaagggtgattctcaatcaaggccatattcttctaacaggggaattggaaaaagaagaattcagagttagaaaaaaatggccaccagaacctatgacgaggacagtttagtctgatatttgcccttgtaacaataatgagcctatattttagaaacaagtaatgcccccttccccacctcatagaaaagagtttatgaaaactctattcaggaattgtattttgttggagagcaaaatttctcactttgtaattccccctttatgtcacttaataatatttaagttgtattgacttgaaagcataaggcttataggttattatgcggaaaatatatttctccaaagcaaaagcaattccttctggagactggagaatagctactcacatcttgactaaagatttttatttaaaaacaaaaagtaccataacactttagaccaagtggggaacttgtgaaggcgattacagaatttgctcattttgtagtttctcagagctattgatttctatcagatccctctgaagcatttcttataacatacgtttcaagtaatgaagctctctatagtttggtgacattacatttaatctaatatatgattgttgtaatggggagtgttataaaaataataaataatcatttatacttgcttttattcagtcttcttgatcaagcatcttgtaaccatttgtcgtacatggtttgccttgtgaaccacaagagtgcatttttaaggggagtggatgtggaaaagttagagagcacgacaccattggatttggtgtctatcaggggccggcctcctgattcatagatggcatgggtgtgctacacaaggtagtagaaggggctttctttatgaggacacaatcttattcatgtgtgacatgtaatcccatctagatcagagtactcacccatcttcgccccctgtacacctacctgagaaatgcttacactgaccatgactgtggtcacaggaactggttcaagctctctcttccttggtggtggctgtttcctgaagaattcctcccattctctgtattaactgcccaagaggaagaaaacaaaaggattgctaggtatctgggaggtgtgtgacagggagctcaggccagaacagcccttcaatgaaaggaaggaggacaccaagagctatgggagagcagggggcacgacaggtgctcaactttctcatcatttcctgacctggatttaatatgtgtccattttccttcataacacaaacacacatgttctcattctccatgtactctcctctcctccccttcacatctatctatctatctatctatctatctatctatctatctatctatctatctctatctttatctctcatacccttggtctcaatttccttcatgtcttgcgaacattttctatttcaaacttttgagtttccctggctcagtgaagagttggggactccatggttatgcaccgagttttctgctgggtgtggacaatcaatactattcatgaagaatttaattttagagcttgagcaatcctcatgatggtatatgataattttatcatgtgattataacatgtatgctgtgatctctcagtggcttttgaagaaacagcatctatacatggttctacagaaactagctaaatgtttccagatattataagccagaactctcacttcctgaatgagatttacaccctaataaggaagattgggttcatcaaagaataaaatgactatgaaggatggttacagaaaacagtctgtgaattgtatcctgagtattctgaacttgtgagctaatatccacttatcaaggagtgcatatcatgtgtgttcttttgtgactgggttacctcactcaggatgatattttctagttccatccatttgcctaagaacttcatgaattcatcgtttttaatagttgagtagtactccagacactattgtggatcctaacaagtgcttgctgacaggaacctgatatagctgtctcctgggaatctctgccagtgcctgacaaatgcagaagtggatgctcacagccatccataggactgagcaaggggttcccaatggaggagctagagaaaggacccaaggagctgaaggggtttgcagccccatagtaggaacaacattatgaactaaccagtaccccgagagctcccagggactaaaccaccaaccaaagagtacacatggaggggcccatagctccagctgcatatgtagcagaggatggccttctgggacatcaatgagaggagaggcccttggtcttgtgaaagctcgatgccccagtgtaggggaatgccaggacagagatgcaggagtgggtgggttagtgaacagtgggaggggggatgtaatagtggggttttcagaggggaaatgaggaaaggggataaattttgaaatgtaaataaagaaaatatctaataaaaaagaaaaagaaaacagtttcacagcctttcctgcatacacctgcctctgtctcttagaacacagatctcaatagttacctaagaagtcttttctcagcaaatccccaaagaaagctaaggcacaggaagctaaaagtattgctcagagactctcacatgctaagtgttagaggctcaaatgaggaggtttgacacaaggcccttttctcaagtctagaactagctagagatgtcttccatatttatgattttctcccaaacctacagtttcacctccctcgcctattttgtactctttttccttcccatctaatgctttcattaggtttattggtagaactgagaaaatatagaacagtggataagttcaggcatgtttattgctagcacatatagggagattcttgggtcatgctatgccttcatcattcaggcagacctcaataggccaggaaatttccagaaggcacattatgaggcaataggttaaatgccggaacctaagttgagagagtgtcctgtctggccactggggtgcagagagcactaccagcatgatgcgcaggggaggtaacacagtctgaaacggggatccttagtccaaggttccccaggtgaaaaacagcggagtctggaacgattgctgtggttctcaggctccggtgtactccggtgcccgtggttggcggactgctgggagttgggaacaggattcccaattggggcttccccagccagtgttcaggtgccaggcaggaaggggaaggcagagccccacaggggtggaaccctctttggtttcaagttagtgccaagtatacagaggagctgggacggaggcttccacattgctgttcatcaccaaaggaagtcaggactggaactcaagcaggtcaggaagcaggagctgatgaagaggccatggagggatgttccttactggcttgcttctcctggcttgctcagcttgctttctttttttttttttttttttcctttcttttttttttaattaggtatttacattttnnnnnnnnnnnnnnnnnnnnnnnnnnnnnnnnnnnnnnnnnnnnnnnnnnnnnnnnnnnnnnnnnnnnnnnnnnnnnnnnnnnnnnnnnnnnnnnnnnnnnnnnnnnnnnnnnnnnnnnnnnnnnnnnnnnnnnnnnnnnnnnnnnnnnnnnnnnnnnnnnnnnnnnnnnnnnnnnnnnnnnnnnnnnnnnnnnnnnnnnnnnnnnnnnnnnnnnnnnnnnnnnnnnnnnnnnnnnnnnnnnnnnnnnnnnnnnnnnnnnnnnnnnnnnnnnnnnnnnnnnnnntaaagtttgcaagtccaatgggcctctctttgcagtgatggccgactaggccatcttttgatacatatgcagctaaagacaagagcttccgggtactggttagttcatattgttgttccacctatagggttgcagttccctttagctcccttgggtaatttctctagctcctccattaggggccgtgtgacccatccaatagctgactgtgatcatccacttctgtgtttgctaggccccggcatagtctcacaagagagagctataactgggtcctttcagcgaactcacacaagtcaatggcctttctgtatacaaaggataaacaggctgagaaagaatttagggaaacaacacccttctcaatagtcacaaataatataaaataccttggcgtgactctaactaaggaagtgaaagatctgtatgataagaacttcaagtctctaaagaaagaaattaaagaagatctcagaagatggaaagatctcccatgctcatggattggcaggatcaacattgtaaaaatggctatcttgccaaaagcaatctacagattcaatgcaatccccatcaaaattccaactcaattcttcaacgaattagaaagggcaatcggcagattcatctggaataagaaaaaaccgaggatagcaaaaactcttctcaaggataaaagaacctctggtgcaatcaccatgcctgacctaaagctgtactacagagcaattgtgatcaaaactgcatggtactggtatagtgacagacaagtagaccaatggaacagaattgaagacccagagatgaacccacacacctatggtcacttgatctttgacaagggannnnnnnnnnnnnnnnnnnnnnnnnnnnnnnnnnnnnnnnnnnnnnnnnnnnnnnnnnnnnnnnnnnnnnnnnnnnnnnnnnnnnnnnnnnnnnnnnnnnnnnnnnnnnnnnnnnnnnnnnnnnnnnnnnnnnnnnnnnnnnnnnnnnnnnnnnnnnnnnnnnnnnnnnnnnnnnnnnnnnnnnnnnnnnnnnnnnnnnnnnnnnnnnnnnnnnnnnnnnnnnnnnnnnnnnnnnnnnnnnnnnnnnnnnnnnnnnnnnnnnnnnnnnnnnnnnnnnnnnnnnnnnnnnnnnnnnnnnnnnnnnnnnnnnnnnnnnnnnnnnnnnnnnnnnnnnnnnnnnnnnnnnnnnnnnnnnnnnnnnnnnnnnnnnnnnnnnnnnnnnnnnnnnnnnnnnnnnnnnnnnnnnnnnnnnnnnnnnnnnnnnnnnnnnnnnnnnnnnnnnnnnnnnnnnnnnnnnnnnnnnnnnnnnnnnnnnnnnnnnnnnnnnnnnnnnnnnnnnnnnnnnnnnnnnnnnnnnnnnnnnnnnnnnnnnnnnnnnnnnnnnnnnnnnnnnnnnnnnnnnnnnnnnnnnnnnnnnnnnnnnnnnnnnnnnnnnnnnnnnnnnnnnnnnnnnnnnnnnnnnnnnnnnnnnnnnnnnnnnnnnnnnnnnnnnnnnnnnnnnnnnnnnnnnnnnnnnnnnnnnnnnnnnnnnnnnnnnnnnnnnnnnnnnnnnnnnnnnnnnnnnnnnnnnnnnnnnnnnnnnnnnnnnnnnnnnnnnnnnnnnnnnnnnnnnnnnnnnnnnnnnnnnnnnnnnnnnnnnnnnnnnnnnnnnnnnnnnnnnnnnnnnnnnnnnnnnnnnnnnnnnnnnnnnnnnnnnnnnnnnnnnnnnnnnnnnnnnnnnnnnnnnnnnnnnnnnnnnnnnnnnnnnnnnnnnnnnnnnnnnnnnnnnnnnnnnnnnnnnnnnnnnnnnnnnnnnnnnnnnnnnnnnnnnnnnnnnnnnnnnnnnnnnnnnnnnnnnnnnnnnnnnnnnnnnnnnnnnnnnnnnnnnnnnnnnnnnnnnnnnnnnnnnnnnnnnnnnnnnnnnnnnnnnnnnnnnnnnnnnnnnnnnnnnnnnnnnnnnnnnnnnnnnnnnnnnnnnnnnnnnnnnnnnnnnnnnnnnnnnnnnnnnnnnnnnnnnnnnnnnnnnnnnnnnnnnnnnnnnnnnnnnnnnnnnnnnnnnnnnnnnnnnnnnnnnnnnnnnnnnnnnnnnnnnnnnnnnnnnnnnnnnnnnnnnnnnnnnnnnnnnnnnnnnnnnnnnnnnnnnnnnnnnnnnnnnnnnnnnnnnnnnnnnnnnnnnnnnnnnnnnnnnnnnnnnnnnnnnnnnnnnnnnnnnnnnnnnnnnnnnnnnnnnnnnnnnnnnnnnnnnnnnnnnnnnnnnnnnnnnnnnnnnnnnnnnnnnnnnnnnnnnnnnnnnnnnnnnnnnnnnnnnnnnnnnnnnnnnnnnnnnnnnnnnnnnnnnnnnnnnnnnnnnnnnnnnnnnnnnnnnnnnnnnnnnnnnnnnnnnnnnnnnnnnnnnnnnnnnnnnnnnnnnnnnnnnnnnnnnnnnnnnnnnnnnnnnnnnnnnnnnnnnnnnnnnnnnnnnnnnnnnnnnnnnnnnnnnnnnnnnnnnnnnnnnnnnnnnnnnnnnnnnnnnnnnnnnnnnnnnnnnnnnnnnnnnnnnnnnnnnnnnnnnnnnnnnnnnnnnnnnnnnnnnnnnnnnnnnnnnnnnnnnnnnnnnnnnnnnnnnnnnnnnnnnnnnnnnnnnnnnnnnnnnnnnnnnnnnnnnnnnnnnnnnnnnnnnnnnnnnnnnnnnnnnnnnnnnnnnnnnnnnnnnnnnnnnnnnnnnnnnnnnnnnnnnnnnnnnnnnnnnnnnnnnnnnnnnnnnnnnnnnnnnnnnnnnnnnnnnnnnnnnnnnnnnnnnnnnnnnnnnnnnnnnnnnnnnnnnnnnnnnntttcatcagctcctagtaggaacacagagtagtagctaaccttaaacatgggatcctgagaggatattcaaagtaccttattcttaaattattctttattatttcaaaaaatgtcctttttagtgtcccgttgaatgtttgtgtcgtccattcaatctgaccaatggtagccatgtgactcttctccctggtgagcctctaaactattgaagtgtcgtgtggaatataagcatacaaatcactctcagactcttgggatgcagcctctagaggcttgccctactggatagtaaatggcaaagcaagcaaagccctcgtggtgatcagaagtgttccttagtctccctcctcagcttggtggttgagaaggtagctacgggattcatagaggggggaagaatgtgcatcacaagcgtgggttcttgcttctgggccttatcatcatctaacttaatggtgagccactatagtaaagatttctgctcatcaattttgagtttagaattttactatgcttaagaatacttgaaggggtattattaagaaaattttattttctgaccagagtgaattgtttttttttaatcagaatttttacttttaagccagtagtttctaaaatcaccattcctataggtgacctaattgacagattatgaaataataatagaagcatggttttgtgcaggagttaagatatcccaattatcagaaaaacatgtcaggtggaggagacatcacctaaaaattgtccttgtgagtccaaaccacaaaagtaaagacagatttttacgagccacttaaaaaattcctcttcatggtttcaggatatttgaatagaccttggaactgcactgagctcttacgtttcactatgtgtccatgtgtgtatgcacaagtaggtatgtacatacttgtgagcacattcatgtgtgagagtgtatatatgtatatgtgtacatatgtgtatgagtgtgtaatacatgtgtaaatgtgtgtatatatgtatatatgtgtgtgtacatacatatgtgtacatgcacattgtgtacatatatttgtgtgtctgtgtacatatgtgtgtatgacatatgtaacatagtatgaatgttgtagtcagagataaaccttggatgttggggcgtatgcttcaccttgtttgaaacacaatgtcctgttggcctctgcatatgtcagttgagttgcccacagcttccaggaagtcccctgtctattttccctcttgccgtgggagcactggaattacaggtgtgggatactgtcagggttgtggggcaaatccttcaaccactgagccatctccctagcccaggattcactctttccataactggagttttaactgatacttcgaaagtttcctcttctttactgaatggtttgagagcagagatgtctcattatactcttcaatgctcccctttagccttgaaaccaacgacttctaaatgctgtgaagtaaattgattgaaccatgctaggtaatacaaatgaagcttataggaacaggatgactgtgatccttttctgaggaggagatggattaataagatagattctgccacagacccaactctcgggaaacatctgaaagcctttccagaaatctataatgactgatgtgactcttgttgatatgtgtgtgaggctcattagtaactggttcaaaagctaatgacagacaggttttcgtaccgctatttgggacccatatatgtgtgtaacaaatttttttcaaagcctatttttaatgatggttcctaaaccctttaacctccctttgagctcaccacccaccagacgtaatggaaaagaaaggatatgagggaagtggacctgtttagaaaggttctttgtgttgtctgtaaattggcaattcacaggctagcagtggcaggcagctccatccactcacaaacacaccagcagtagagtctggatatcagcagtggtggcacaacctagcagaaacagccaggcctcagcctcaaaactagtcagcaggagggactaaggaggaacaccaggaaaagctcttggctgtgcctctctgagcaaagcaaacatcagcaaagatgcaagaccaacaagcattgcacagctggctctatatgcatgcctagctccctctccatcactgtccatcaagccctctttatattctctgcaaacaccacatgtcctccatgggtcttgcctcagcatatgcctctgtctcagctgacatcactctgccaatcatcctgagtctgtggaaatggcaggaagctgtgcagaagtttttggtgccttcctctctatggagtcccaacaaagacagctcaactatgaagtgtaagaccaatcaatacaagcatgttcttagaaagaatccttcatcacgtgtcctttcacgtgcttgctttagcagaacatcctctctcctgtgtctgcttcaaggaaacattccttcatgagtctgccttagtctttcacctgtgttctgctttaatgaaatgctcctgcatgtgtttgccccagcaaaacaccatctaacacaaccgactttccaaagagtcctaagtttccacttcatatatgagaaaatacatacttaggaacaagagaatggtggacagagaattttgaaaacgattatagaaacaacagggatacaggatctcacacacacacacacacacacacacacagagagagagagagagagagagagagagagagagagagagagagctaactgtaatacaggatccctcatcctagggactgtttgacactgaggactgggtgactcttgttctgaggcttagtctacactttgtggaatatttaacaatatattgactgaatgctagctaataatattcccttgaggcttgcaatcctggaagtgtccccagaaattgcaacacgtctaccagagatatttaacaaaagagaaataatattattatgtattgttgaccccgacttttgtatgagtgcctctagccctgggcagaagtatgaatcagtcactgtctttcttggtctcagtcttctcatggttttccctactacagagatgagaacgcctcctttcccatctctctcataatgagccatgccctggttattgtaaagagtacactgctctggtctgtgatttctaagttgaaattctgacacttaaggtaatggttttagaagacagcatttttaggaagttattgtatcataaacatgaggctttttttttttaaactaagattagtgacccttagaagaggttctacattcctctagtctccgcaatcagaaagctaaggcaggaggattgtgaatttgaagccagtgttggctacatagtgaggccttgtcagacacagacagatacagagagacaggcctgagagcagctctccgctccttccactatgagaagataaagtaaggacatctatgaaagagaaagcagacccttggccgatagtgagtcaattgatggctggatcttgagcccctcggcctctggcactataaaaaacaaaacaaagcaaaaaacttggtgtttataactgtcttgtgtagagtgctttcttgaggcagcctggatgatctgagaacactttagcaaggctgaattgtaatcagtcaggttatatcttttatcttgacttttatccagaacagaagtctgacatagactgctcagtaaacatttgccaaagaaaagtcaccttcgtaacataataattttcggtgtctataagtatctacagaggctgtatagccagaggttcagccgggacccatgggctccaaatgcaaactatttaggctaaattgcaagtgaacttgctgcaagtagcaatatatagcaacatgtaagcagcgtgaaatgaagtcaaagaggaaagtttccacgggccttgcagattagacgtttttggctccagtggcttggtgagctgaggcttcagctgacctagcaagagcagatgggaaacgtagagcctaataaagagtacacagaagataacaactggtcctcagccaagattttaatgctgtatgaggggcagacaatatctcagagaattcacattgtttctagacagggtaagaaggagttggatgcagctgggtgctacagatagaatctgggccaggccccaaaggtgcctttgttctcttgcagagggtgagaatgtcctttcttcagtgccggctattttattgctgtcgaaaaattatggccagttaaagttgaattacatcccctacaagacacaccgaagacttttccctctgtgccacagaatgtcaccttaagtgagaatagtgctgttgcagatataagtagttaaaatgggatgtgtaggtctggggtcctgataagaaagcaagcccaagaagaagataacaagtgaaaagaaagcccgactcaagtgctgcagccaaaagccaagagagcctagaagccaggctgaggtcagaaatatcctcacaggaagtgtggccctcctcaaagccttgggtttggacttctctcaggtagcttgagttcatttggtttagtctgttctgatctaggcagatctattctggtctggtctggtctggtctggtctggtctggtctggtctggtctggtttggcaatgatgagaactgaacagtccagggcctcttgcatgccaggcaagtgttcccccagtacgctcacacccagccctagtttggactgctaactcccagaagtgagacattcagttgttttaagcccctgtggcactctggcatggaagccatatgccatctccaaggacaaacaccattgctctctgtgttccctctatgcagactcaggtacctccacagtggtcatgggtgacgactgcctgttttgatattcaaattctgctctacctggtggctcctcccctgggaattaccagtcttcctcagctgttcttactctgccaggttggctaaaagctaggaaccacatgcgcactgcttccagaatgaaaaagggcagaaggaacagagctggtccactctcagagaaaatctgcttgggagtccctatgcccacagatctttctctatggctcctcttttcatccttgtcgcatggagccaggaagcatagcttgtgttttccctgtgagaggccaggttcgtgtgtaaatcaacatctgtggccatcaaaatgtctgcctccagagagcactcagacacagcattttcttaaatgtggagtgacaaggactgagttcagcatgctgtctaccactgaggtacattcccccaatcctctctcctttcaaatatcaaatgtccttacacatgtaacattatatatccctggtaatctcgatcctcacaaggaaatgtgtcagcaggatgtgttctcttcattactcctgagtacctaaagactaacttagttcatgaactacacacatgtaagcctgctcttttgagagaattgactttagtacactcacagtggccttgcatcagaatgaacgaatgctgtacatgcatttgggatggcaatgctttaagacatgacagcggattataccaccctctcactcaaacagctggtcacattcagctgttgaggtgtttttgattttcatgacagtcttagtgacagttttgctgctctgggttccatctcattaagacctggataatcacagcttgaattaggaagtattaaataaagggcgagaagagatgaaacccaaattacacagtgaatatggtaagcgaagaagtaaaagcaatggaaagagctaaatgatgaaataaggtatgggagagatgagccagttggtctcctattggggcagatgtaacagtgaatgagacgttcttttaaaaaacaccaattttattgccattattccaaagtcataagaaagggatgcgtactgtaccgacctcacgatccaggtaaccagcaggaatggggttttcttgttgaccagggtcacttgagaagccgtagtcctgtcacgatgggcagtgcctcctctgcataaacacagtaaatcctttttcttcttttagcacggggaacaatgtagcatcataagcgccttcgtcaccaaagccttgtgcaagtacctggctccccccagtctccactgcgctcagcacagccctgggtatttagtgcttgtagatacctgactgttcatggatgcagggtctgggagtggaggctgactggtgtctgcttgacctcctaggtgctgaggtgacatacatgaacatgaccgcctacaacaagggccggctgcagtcgtccttctggattgtggacaaacagcatgtgtacattggcagtgcaggcttagactggcgatcgcttggacaggtaatcgacccaccatacccaaactcaacatctgtggccatcaaaatgtctgcctccggagagggctcagatatgtacagcattttttgagataccaaggactaagttcagcatgctttctaccattgaggcacattccccaatccagtgtttcttacatttatctgcctggtttttaagaggcttgactttgtttaatgtggaaaaacaaacctttcctctgaaggatcattttatcagataaataatgtgactgacgctgagtcaaagcttaggaactcagatgctgctgtgagcatcttcagaacaagttgcatatgggttgtagcacctagactcgaggagaagggatgctactacactatcagtgaaacaggaaaccgtgcctgctcaacacagaacagtgtgataagggcaaaaatcatgtggcatattccagtagatgcttaagatggaaatgttatcatactcttcacagctaattaatgtcaaatgtcttgaaaataaacttaggcagtcctgtaattttcatatatttgtgctggccagagctgatccatagaggattctaaaactgttgtatttccgtgtgtctctggaaagtagacgctccctgtcactgggtgcttcgggcacctgaccacttatactacagacccgacacatacctatcctagctggcctttgggtaagaagcactaaagggagacagcaccaaggtgccagtatttctctgacccatgaggaaaggtggcatcatgccagataactggaaatgggaggcggtgtgagtactgactgttttgcataatgtaactactagcctctcagattccattctttccttcgtcttcttagacttctgcctttcctgctcccccatctagttctcctagtttatggtgaagtaggcaagcatgctgagatatagaagaagcaggcagtatacaaacagggtgtcagcaacccagttgttttcctctgcactgaagtgttggtatacatctaaaagaaaacttatcaagtatgctgatgtcacattaaggaataacagaacttccttctagaatagtatgagcaagagcaagcccaaatttgataactcaatttctctccttgggtcatccatcatagtatggttactagccagtgtgtttgtatatgtgtgtgcatgtgtctgtctgtctgtctgctgtgtctatctgttttgcctgttcctagcaaagggctttgttctgtattcattgaacaccaaagaaaacatatgggggaaaaaatgaaagattcttaacagaaacatttaacagaattttacaagggaaaaagtgactttactgaccaaaaatagcactcaaaccacaagcaggtattatcagcctgtgtccatgggctgatataaatgcttccaacttttatggtggatattggttttgtttaaggttgtcttcaaccgttggctgctttcagcaaatgattacaacacacacatacacacatatattattctgggttggggcatgaacgagtccacaactgaagattaataggcatttagcttaggctgtaaaagctgattacatgggaaatccaaggcatagtaagcttattacagtgcttgcttaaaggcaggttaagcttaaacaagctgagtgcacagtagatagcagtttgcttgggaggtcttcacaatcgcaaggcattttatgaacgtggctgcaaagctggcaaaagttcactctcttctgagacaacaggtgcttccccacctccaccacaccacagccaaggtgtactttctggtttcaattttaaaagaaagtcaaagtaatctaggttagactatttttaatatggcagtctctcactccagctatagattggaaaccatgccacaactctctggagaggaagacattgtcaaagaaaacaatgcatattttgtatctattcagtaaattaagtgctatctacagaattaaaaaatgttctggggaggctaaagcaggaggatgtgttggtgggaaatgtttaagccatatgatgttccccatatgggctttcttgtggaaatatgttcttctgctggttgtaaatttaataacaagccaaactccttgtagaccagagatgtgggccaagacaggagaagggggtcatttcctaaatgctttcatttatatgtcagacactgaacttatgaatattttgtaaagatttcatttttaattgtgcaagtgtgcatttacatgtgcatgagtgagtgtgtgagtgtatgtgtgtgtctgtgtgtgtgtgtctgtgtgtgtgtgtgtgtgtgtgtaggtatccaaaggagtgtaggtgccctaagaccagggacattgaatccctcagcactatagttacagacagttatgagctaccagttttgggtgctggtaaccaaacttaagcattgtatgggtcgtctttctagtctttgtgataatttttcatttgtcataattatctaatggtagatattatctctagcctccttttatgttgatcccagaaaaaaatataacaaacagatcctattcctgccattccttcattcaaaataataaaacacactgtagcctgtttaggattgatgtcaatcttagattaacactcacatcagccaaatctgcctcttccacttcattgttattgatctgaaccactcacatcagttaacccaaagtcacaatgttttattttgtggctgctgaacaaaagtcctaaagactgtcttagttaggattttagttctgccaagtgacaccatgaccaaggcacctcttagaaaggaaaacatttcatcgggactggcttccagattcagaaacttagcccattatcatcatggtgagaagtatggcagtatgtatgtatgatcattgctaataatgatcatctgagacctgaaggagctgagagttctacatcttgatccaaaggtagcaggggaactgtgtccctggacctagcttgagcatctgaggcctgaaagctcacctccatagtaccatacttcctaaaatagggccacacctactccaacaaggctatacctcctagtatgtaataccactctctatgggtcaagcattcaaacacatgagtctatggcagccacctattcgaaccaccacaaagacaaaaccaaatctagtttctgtgctttcaggcatctttcctgtgttccacctggagcaagctgcactcttttgatagaagtgtaatgcagataccatccggaaagcaggagcggtctaagattctgtcacaagagcacttactattccagtagcttccctccatcaactgccatacacccaggacctctttctccttgtccctctgaccctccgccacacctaagcataaatactgcctcctgtctgcccatctttgtcacaccattctcggttttggtgctatgttgttgtacgcacagtgaagaaaccaccaaaacagttgggtcatgactggggaaggtttttatcgtggaccagagagagaaaatatctagaggcatctggaagagtccagagcagagagaggaaaaaagaaaaagaggaaaaagagaactggacaaggccaaggctccctgtgtgtgagaagagagagttgtgggaaggaacagtggaggtagcagaaaatgaaaatagtaaaagcagtaaggacggggtgaagaacttgactgtaaagagagtaacttctgaggggagaagggcgaggaggctagtgtcagggctttgaaatgtataactagtacttgtgactagggactgggggatcctgaacaattgctggactttgatctgctcatctctgctgcaggtacatgtcaataaagagctgtatgtccctttttgccagaggcaaaaggaaacctgtttcacaaattcctgagcaatgctggcttttatgggtcagtcagaaatccttctataacccagcttgaattgagcctaggctgtcatttctggacactcactcttcctaaaacctaagttactcaacactatgtcaccttgaatgagtgttccttttcaccggaatacacctgccaggagtcaagttcaacttgttccctcagctttatattttgtgtgtttttctaatgaaatctagattatggctaatagtgattatttgaaatctgtgctaagtgaaagaagtgattagagctgatcttccaacttccctgtgtcgtggcgtttctctatgcatgcaggaagggcatgagttccttccattttcaccatgtctcttgcttgtaaatcattcaatttggggtcctgtgtccttccaggaaatggtgatgctaaaattcaaacctatgcccctcaatgctgaagtttttgcttttatttgacctttaccaccactaatttttaaaaataaggtatgcttaccaaaaaagctatgtttatattacttcattgggatgagaaaaatcaagtcacaattctttcagaaatcctgttcacttgcatccaacaacatgccctgcattgccccaacaatatacaatgtggtggccctgaaatgacatctcttactcatttctgaagctttgcaaactcccaacatctcaggggtggatttcaaagaccaggaggccctgcatatatgtttgcttctgcattcctcgtctcctcttgttttattcaaggactcccttagaattcccgcccacagggaggcctgtgggaagaaagaacacctctccacaattctcacttcatgagcacctctacacaccagggaggaaaggagaactgtagctcataaaaaacaagtggaacaaaaggccagctagtttgagaaaggaaggcattcaacagtttcaggctctggaggcgggaagctgaaatgggagaagctggggagggaaatatgaaaatcaggcttttagaaaaagttacatttatagtctttgagcaaaccctcttagcttggagttgaaaggtaggattcaataggtccattgacatcaagaacctggcaacttggggaaaggagagaaatttaagtattgttctttaatgggattattgtattatactatacgtagttattgaatagtgctctttagtgggattgcaacaaagaagaataggcttatttaaaccctgagtgtgtgcacaatttcatcatagctacttttattgtggaagaaattaaaaggtagacatgaaaataaatcagttcttgggtaggagggcatggggatcaggagagcagaacccacaaaagtgtcttagtcagggtttctattcctgcacaaacatcacaaccaagaaacaagttgggaggaaagggtttattcagcttacacttccacagctgttcatcaccaaaggaagtcaagactggaactcaagcaggtcaggaagcaggagctgatgcagaggtcatggagggatgtttcttattggcttgcttgtcctggcttgctcagcttgctttcttatagaacacaagactaccagcccagagatggtcccacccacaataggccctccggccttgatcactatttgagaaaatgccttacagctgaatctcaaggaggcagctcctcaagggaggctcctttctctgtgataactctagcttgtgtcaagttgacacacaaaacctgccagtacaatgaggaagaccctaaaactcagcaatttgtttcagacttctgctgcatggacaggggaccacctgtccagctcaagatctgagtgataagttggatcataagcttttaatctcggagctagaaattaatctggtggtcactcattttctgagatgtatatatgatggattatttcagggacatggtattggtcattgcctgggaaaaaaagactctcactatctaagattgagaaactatgtgcttcctttaagtaaatgtcttcagtgtgctaaggcactatgaaagggtggagagggtgtgcctctcatcatgcctggttgactttgaaacacttctcatggttaattttatagatccttgaagcctatgcatagggacactaaggtgaggcagaatctggagctgaaggctggcagttcatttacctctaacctacagaaatctgggctctgtaactctaggagtttcatatccgcaaattcaagcaactgcagtcactctgactgatagagacagtgagcaagagcaggaagaaatatttgatgggaaagagctggcagagtggtgtcacagtgactggtgagccatgagacaggaaccagagagagcaggtgacactgttcccatcagctggagctggggccccagaagaggacaagactgtcaacagagacggtctgtcttcggaaggtattcctgatgtcctttggtttgttggagaaacggtaaggagatggaccactgtggctgtttatagctggagcacttggacagtgataacgttactgagcctaaagatgctaattttgtcatagctgctgtttctagcatgatcacttggtggacagtgacatgagtcaaaatcacagtccttcaccagatgttactatagcctggaattaatgatgaaaaagtcactaagacctacccagtgtttgagtccctctcttgtgtatctatttgtgtgtgtgtgtgtgtgtgtgtgtgtccatgtatacatgtgtatgtgtcagaggatagaggtcagctgcaagtgtttatcctcaggatggcatccctgttcccccccacacaccatcccaccttaccccaacccaccctcacctttgagacaaggcctcccacttgtatctgaagtttttcagttaggctagtcctgagactccacccacctttgcttccccagctctgaggttacaagcacatgctaccatgtctggctttatagaaagtggattctgagggattagggatgacaattgggtccttcacgattacccagcaagtcatttgttgactgatccatctccccagcccttgagtctgtcttgttcctgatttttttttctattcaaagaaaaggtcacaggcagagagctgaagctccaaggagctcagtgggcaggagtcactggggaaggcggctcagtctttcctatttggtgctagcactgagctgatgtttttcttaaaatgtacaagttttggaagacactctagctcctcaggaaggggtgcacgggtaattcaggtaaccagttatcaagaacagaatgtaaatgaaaaggcaaaaggcaattcaagcgcaaatacagcagggaataattagtagtgcttagcaaacatttaacaaaggaaagcaaataattagctcttccttattggttgaaagattacctgtgcagctcagaaaggctgttttgtttgcacatgcattttaaagtaaatgagggggtggaagtccctgcttttaataaaatatatgtataaggaagcagtgttttcaataacagagctatgcaaattttctacagtttctatagtggcaattctgcaagtaatatccgaaagagcataaataaatcttttcttcttgtctcctatgggaaccattctttcaaagctactgaattgtctcctgcctccgtttatggggtggcatggaggagcaagagcctgtttcaactttctcctgcctgtgctagtcacaacatcatttctgagtaaagtttatatctgagctaatagtcagtgtcctgtccaccttcactttctcctcttttccaaatggcttgatggcctggagtctcctaatgtgtcctgtccttgcgatgtctgtcctgttcactttaatatgtgtgtgtgtgtgtgttattttgttattttgtgtgtgacggatcatgtgtgccatgcctacacatgtgtgtgtgtgttcctgtgcatgtgtgtgcaggtcagaggtgaactgcatttggttggttcccacctttacatgggtttctgggattgaactccagttccttccttccacttacattgtcaggcagcacgaacctttgcctactcagccatcttgttggctcctgatcattgctttcccctagatatagagcagtggattaaaggctctgctaaattatgattcccttgagttcaagtaagagacttgccttcaaacccaatgcaaaatccccccagctgtggacttccccctcttcagtgatgctctgaccttgggagacaggtactgctgctaggtttccggttctcccgtctcactgtttgtgttggctgtttctaagctgttgttctgcactgaaacacagtggttaaagtcagagcagaaactgactttgtttccttgatcttgtagctgtacggctcagagcaagtcatgccatctctttgagttttcatttgttcatctctacaattgaactgatggtgttgctggggaaccaaaagagtcactaaaacttagctggcatcacacctgaaacgtgggagctgtcaattaactaagcattgagctgatgccgcaggaactagagttgtttagactgagaaggaatgctggcattgatgcttattccctgccatcaatggtccctttcataaacacatgaccttcttaacagcatagtatggggtgcagtgacatgacaggggcatggcccactgactgtgactcactgaaggcaatactttaatgacttgctatagagcttttgtgctaattatcacaggcaatgcctagataattaagcaatgttaaacaaatccgaacaatgaagccagagccatagcatttagaaactagacttggatgttcacaggaatcagaccaatgctcaccaaagaaagtggaggggggcacagacacaatggagaaacactttgagctgggctcaggatgtggagggtgtatcatatatgttttctttatcagttagaagcaaagacagaagcaaaggaagctagaagtcactggtcaggctttggccactggtgctgattgcctaaaactgctgttcttggctctgctacaaggacacaaggacagtggcagccaggagagcattggctggttgctgcaggttgtataggtcagagttccaaatttacatgttgtcttgctgtcttccagctgtgtcgtagagtttctgttgctgcagcgaaacacatatccagaaagtaagttggggaggaaagggtttatttggcttacacttctgcattgctgtttatcaccaaagaaagttagagcaggaactcaaacaaggcaggagcctggaggcaggagctagttagtgcacagactgtggaagggtgctgcttactggcttgctcctctggccttgctcagcctattttcttatagaacccagaatcactacccaccatagactgaaccctcccgctttatcactaattgaggaaatgccttacagctggatctaatggaggcattttctcaactgaggatccttcctctctgatggctgtagcttgtgtcaagttgacacacataatcaaccagtacagactttattgcatattcaagatcagtgataggataagaacatcctcagacccatacactgtctccccataaattgttttttttttccaatcctttgtggatattaggagcctatactgaagattatgatcgatgtctcctgagtgtggttaatgacatgaaatcccagtttcctgcctcttatccacctttctctctttcccctccctacctcagtcactttggtttcaactcatatttaggtttgcattagttagctgttgcttttgaacccttgcgtatcgatttctgacttattaatttgattaaaggtcaaataagatggtgactattcttcatattctgtgctcttctcagaggaagatttcagcttcccagatcagagacctcagatagaatgctccgtgagatgtaggcaagcatgcacagaggggggctcagaagctggcactagatccttctctaagtgtagaattacctgccagaatctccgagattcatctcaaacagatggaaaatgtcagccttggatgtttttgttttcaagttatttttagttgtcattgtcatttctgtagtgtttgcgcacagtgctcagaaaaagtaagagttgttgctaaagaaaacactcgacttactgtttcaaacacaaacagaaagcagaaggaactaaaggacaggggaacctggcttgggaacattttctaagaaaaaaaattatttaggggagcttgtctctcttcctatttataccaggactctcccagacagcagccttcatcagtgacaagcttccactgtatgcacgcaagtgacagggggttcacttctccccaggcattttattcctggatttctcttaaaaatcatcttccttggtgttaatcccaagcctttgattaagatctgggatgcaagttctcatagactccagtaaaatgacaccaattcacactatggcatgcgtgagcatccagtgagtaacccactagaaaacaggaaagtgaggaccctggcctttgaggccagacattccagagttgggcaggatacaatggggttctggtacttaactggaactctatctagacctttcatggagaagtgtagcattgcacccttcaggtctaaacccaccacagatgcccagaggaggtatctgtagttatttatctgagtttttataagtagttctacagctcgtcagctccttggagggtaaactcaagtaaaatactatcccagcaaataataacgactggtgtggattttgcatagttcctttcatgtttatttttctgatcctctcaaagcctatgacagcaacaagaacttttattacagttctagagtcacaggtgggccgtgaatcagatgctaaatggctaacccaaggacgtggttctaagaagtggctacactatggcaacagctctcctcttcacaatgggaaatgaatgggtagcagccgggtgagaggcacttagactattgacttactgttccagcttttagccaaagaataaacagaggaaaatgcctctgttggtcccaattccaggagcaatctgggaagtagtgaccctggctccgtattatttgcaaagtgagctcctcaatggagagacagttccactgtggctgaccttctccgggggatttgttctctccccagaagaagttatttaaaacccttgactcttttcttatcatcttagacacacacacacacacacacacacacacacacacagagtctccctgaattctcagatgcccacccccccaacaatattaggagtctgttagctttctgttactgtgaccaatacctgccatcaatttataaagagcaaattttgaatttttctaaaggtgataaagatgaactatgctgtcattctgagggtggatcacagtatgcaactgagctcaattgtacacataaatgtaggacttggaatttattacttgcaagtagggtcaggtacatcagtggatagacagttgctaagaagagctttgataacttagtatacccgaggtataagagacaatttgtaaaacacatgaaactgaagaagaaaagtgtggacactttgccccttcttagaattgaaaacaatcacccatggaaggagttacagagacaaaatttggagctgagacaaaaggatggaccatctagagactgccatatccagggatccatcccataatcagcctccaaatgctgacaccattgcatacactagcaagcgtttgctgaaaggaccctgatatagctatctcttgtgagactaggccgggcctagcaaacacataagtggatgctcacagtcagctattggatggatcacagggccccaatggaggagctagagaaagtaaccaaggagctaaagagatctgcaatcctgtaggtgcaacaacattatgaactaaccagtaccccagagctcttgactctagctgcatatgtatcaaaagatggcctggtaagccatcactggaaagagaggcccattggacacgcaaactttatatgccccagtacaggggaactccagggccaaaaagtgggaataggtgggtaggggagtgggggaggagggtatgggggacttttgggatagcattggaaatgtaattgaggaaaatacgtaataaaaaaatatttaaaaagaaaaaaaaagagctctgattatactaaactggcctaccagaattctccctaaggccaggtcaaaattttagacaaggatgtgggtgaacttcatcatgttccatgggtaaggggtaatactgcttaaattatcagaattcttgtttaaaaaaaaaataagtaaacaactatgcaggctggaagccagtatcaaagaaaagatttttattttcattttagaaagtcaaaggaatgtacttaaagtttgttcaaaaggagtttgccagcctctgagaataagctattttcattcaaagttgtattgatttaaacccaatatggactggtgctagaatgaggcagaacattgcggtaggagggcaaggtggaacacaaccacatcatggacaggaagtacaaggcaggaagtgcaagacaggaaatgcaagacaggaaaaagaacctaggattacatgaattcaatagcatgtcctcaaattcctgaaagtctttcactagctccacttcctaatagctccacctcatccactctactatagtagtgtcatggtagaaagcaaaccattgacatgtggacctttggggatatggcagatttgaaatcacctaggagacaagcctctgggaaggtgtttgtagagtttccagagagtattaatggaggaaggtatacccatcctgaatgtgacagcaccatcccatgggctagggtcctagcctaaagaagaagaaaggccatctggaaaccagactcccatgctctcttcctgctctgtctaggtgtgaagagccccagttttgcacacccccacccccaccatgtcctctgccatgccttcatgactgtgatggcatgtgaccatgacttcttgagccaaaataaactatcttccctcaagctcctcactgttggggaccacagcagtgacaaaagtaactaacacaggaggattggttacaaaatcaacacaggaggattagctacaaaagtaactaacacaggaggattggttacaaaattaactaacacatgaaccatccagatcctaactgtaacaatgagagtatagagaagaactggaaaatcacttctacttttcattacttattttatttagactatggcagacattaatgattgttctatttggagaattacctatcagagctgtagttataattttttgagtgagtcaccttataagcgtatagcaagcaaaagtaaaagaacaaatagcaagtggtgggtacatagcagaacatctaatcaggcactatagcatccagaaataataatcttgctcatccgtgccgtgggatacacaatagtggcctctattggaaatgatttacttcctagctattctcaaaggtacagtgtttctcataccctttgccagattgctgttctctctctttatcacagtgtcagggaggcagcctattccaggacaagaaatctcagagaggcatttagataaacaaacaaaagtctgagacaaaggttcttgctttgttctcagagtctgctcacaagaaacacaaatagctcatgacaatttaccaatataacttatgctacagaaataaaaatagagcaacagaaaagtatagcactggtgtcagtgaacttagaatttgaaggaaatgtctgactacagaagaaaaggatgggggaataaagtaggttttgaatgacaccaagaaaggaataaacagggtgttgtgatgataactgcacagtaagaagggggggggtggtgttctctaaaaatgcaagacataagcctgtctgatggtaattatcactgatgaagagatggcagagcctgagtccctggaagaaatggaggacttgtagaacttccctaggttttcttatccaaggaactataggaaagttccaaacatccaactctaacacaagcaggttgagggccagaaaaaggccgtacattcccttagccttttttttccttccttgccattctgcggtctgtattccatcaccttatccagcatgccatcaccagaaccttcagtagcctcaagaatatcaagaactttatcgaactgcgttctgtgctgcagtagtatgccacccatgtaatgaggctcctgggtacaacgatctgcttccttgtgttttcttacttttgaagaatgttccccaacaaaaatgctgtgactagacacaacaagaatgtgattatcctccctgtcgatgcatctctcttatagctttcattggaagtgcaatgaaggatttatgtcaaaatgtctgaactgtctgagattaggttactcttattgatctatgcatgggataaggatagaatgaagtatgactaaaaacagcacatggggagagagactaggtttgtgacctcctatggacacatgtggtcagtcccacacctagactcagggagacccatgccatgctcttatctgacatctaggtggcaaggaagaattgggaatttcaaatttaagttacctataagaaatctaagaagcagtgtcatctaagcacttaagcaacaagcttagtgatgaaggaggcagatgtattactgagcaattatgctgacctcacaccctggtagaacactatgccctgttcagctgccagctttctgcctagacataccttctagtagtctctgtaaaggtattagcagacaggcatgagtctttcttttctttttctgcctgcatatccccaaccttaccgtggccttacaaataaatgcagatgaaatttttcatctctctcctcccctaacaatcatctgtttctacactttgactatactcttcagccacttcccttcaaagctgcagccatctttaatttctctctccttcctctttcctaatccatgcatacagttaattcttaaggggtaaaaggtcttcactcttcattccatagatagagtctcatcacttctatgcacactagagtatgacatcagccacctttttctgaaactgatgaaccttggtagcttgtatttgcttttggcttcttattgtcattgattccagtctctattcagagttcatatctgtaaaataccctatctcccagtactcagacacttcagaaactctcctcaacgtgacatgcaccattctccttgctttcattcccatttatcaatagctcttccagtaacttctatggccccactcataagccaactgatgtagccaccagtggccacagagaactgagtatctggaaggaaagctggggaggaatgggaaggatggacaagagaagaatgagaccaagacaaagtttctgatcaaggcccaatgtttaagtcttaagtctgaatataaagggggaacccatcccccattttgccaggatctcttcgctttgtcaggatcttgtcaggaagacaagctcagctgcccagcaggtagtggcttcttgcaggaagctgcagatgtggcaggacaatagatttcacctaggtcagaagactccaccctaggtgggctagccaactgtggaagaacaaggtctgatttaacctgctcaaggctggggaaaggacacagttcctccctttttatttattaaaaattagctggactggggcataagatttacttatgccccatgatcccgcctgagaattatggtggctggcgcccacttctggcttaagtctgtgtctatactctttcttacccatcctggagaacacgtgcagcttgattgtgtttatgtgcacaaacacagccttttagtatttattatgagcaaacacgacatcttggcatatgtctctgccttaggttgataagagtcatagaacatcagtggcctatctttgactgccagccctcatagcacacctttttcccattcagaccaaactcacaatataaacgcaatgcatttcttcatagtgatgaataaatgccatagtgaatgactgagctcgccaaagacaatcctatgtgaaagcaaccaatctgcttaaaatacaaagtcaaaagttaagagtaaacaggtttaaggttgtctgcagggaatgtcccaagcactcaattcagttgtaaattagcaatgatcagacacaaggcctgtgggggaggtggctttgagaatcatcagaaaaaactgttacttctcaggttatagttgaggctatgctccaaattaactcagctggctaataaagatttttagccaccttcataattggaatcatattttctagaagactcgggatctgtgtccacttgacgaaccaatctttcatgcagccattggtctccgtcttctttttgggaaaaaaaaaaaaaacacacaaacagaacctctcccccatattaaaacgggatctggaccattccatgtattagttaggggggcctcaacatttaaccatggcatatgagctggaatgactggatgccaatggcgatctgcttcaaactaacctttagcatcagtttgcaaacaatttaaaacaaataaggcaaaagcaagatgtgcttctggtggctttggggggtataattcccccttttttgttttttaagaaggtattgttttaaagttccacaataccttgtctgtgagaattataagaaatcccagtaatattggcaacattaaattgttgacaaactatctcaaatgcttgactgtaatagccagttccattatctgttttaatctgatttataacaccaagcccagaaaaatgatgcaggcaatgaacaattacatttttagttgcttctctgttaaagcagttgcaactagaaagcctgaaaaggtgtcaatagtcacatatacatattttatttttctaaaatcagaaatatgagtattcatttgcaataattaagtataagtcctcaaaaatgagcaccattatgtggaacatgtagaaactgaggacactgagaacaagtctttacaatctgacacgcacattctttaaaaataccaaattgtcatctcaagccatcactattttgatgatgtaaagaatgagagtgtatggccaattgttcttgtgtaaggcctatataatctgcctgagatacaaatctgctggggcattgccttaaggggtcttgtccaggcattccaggatgagttcttaatcatccaaggacggtcctttaaagaaacagtactttctcttaactcaagtcatatatgcataaacaattgcaaaatttgagaattagcagtatcttaaaaaggaacaatttcaagcaattgtaagccctgagtgttcagatagatagatagatagatagatagatagatagatagatagatagaggtagagatatattggctatcagtatacaaattaaaatcttgattttcaactctttaaaaacagtggttataacatatagtttgattatttgtgctgaagtagagggaaacgcagatgaataaacatgtgatccaattacatatacttctctcccatagaagggctgtttataaatatagtagatgcattctttatgggatgcatgcataaatttacaggaaatacaaaagcatgcatagaagtaaattttaaaaacttgtcttttgaataatgattatcaattttgcctaaaaagtttaccgtgtggtatgccaaatatcagtattctgcaataaccaatttaattgctgtttgaaacaaggaatagatgtctcatcaggtttttaagacattctttccaaaatactttcatgattctgtcctacaattctttattaacaccacaagagcttcataatagaatgttaagactttacttggagatgaagaaagatgaattcacattaatggtccctttgccaaagaattgctgtgaacacattaagttacaataactaacataaacagctaacaattgattgcagaagctttctctactttctgcaaagctatttgtctctcactagttgatttgcatccccttgataacatgcaacaaaggcttaagtcctcctgtggtgagcttaaggtgaggtcttagttaattaatgtctcctagaagcttttgaaaataatttgaagtaagcaaatcatcttttcattcctgaattttctgcaacacaatttttctaggatatagttaattaatgtctcctagaagcttttgaaaataatttgaagtaagcaaatcatcttttcattcctgaattttctgcaacacaatttttctaggatataactgaggtccaaatattgaaaaagatattgcctctgaatcttttctggagcaacaactattccaaaatttttaaagttcattgtgtaagagcaaaggtttgtagtaagttttccttgaaaggattgctaataatatactctccatataatatacaatatacagtgaaagattcaaagtcctagctttttgtattgaagcagagacaattttttttaacataatgtaaggctattagccattcctagaagcaaaactttccaatgattacaggctcactagaaacaaaccctttacaattgtcaggatgcaaagacaaaaacaaccttccaaatcacatattcaatgatgtaaaacaatgagatagatacaaatattaatgtacagtgactgaaaatgaaagaaaactatgatgtaaggattctaaaatgaacagtaccaaatttactcaatccacatgcaggcattaaatattacacattcaggacatagtgaaaagcttagttttcaagcttgtatgtatggcagggtgtctgaatgtatcataacattcatagtgcacatctcaattatcaatgaatttctacaaataacaatgaaaataacatctaagtgaaatattgatgtaatcatttctgaactactatccaccatatctatccccagccccacgcccctctctccctctcctgaggtagggtcttcagagtccagctgttttatgtaagaaaaatctcgacccgccgaacttaggaaattagtctgaacaggtgagagggtgcaccagagaacctgacagcttctggaacaggcggaagcacagaggcgctgaggcagcaccctgcgtgggccggggacagccggccaccttccggaccagaggacaggtgcccacccggctggggaggcggcctaagccacagcagcagcggtcgccatcttggtccgggacccgccgaacttaggaaattagtctgaacaggtgagagggtgcgccagaaaacctgacagcctctggaacaggcagaagcacagaagggctgaggcagcaccctgtgtgggccggggacagccggccannnnnnnnnnnnnnnnnnnnnnnnnnnnnnnnnnnnnnnnnnnnnnnnnnnnnnnnnnnnnnnnnnnnnnnnnnnnnnnnnnnnnnnnnnnnnnnnnnnnnnnnnnnnnnnnnnnnnnnnnnnnnnnnnnnnnnnnnnnnnnnnnnnnnnnnnnnnnnnnnnnnnnnnnnnnnnnnnnnnnnnnnnnnnnnnnnnnnnnnnnnnnnnnnnnnnnnnnnnnnnnnnnnnnnnnnnnnnnnnnnnnnnnnnnnnnnnnnnnnnnnnnnnnnnnnnnnnnnnnnnnnnnnnnnnnnnnnnnnnnnnnnnnnnnnnnnnnnnnnnnnnnnnnnnnnnnnnnnnnnnnnnnnnnnnnnnnnnnnnnnnnnnnnnnnnnnnnnnnnnnnnnnnnnnnnnnnnnnnnnnnnnnnnnnnnnnnnnnnnnnnnnnnnnnnnnnnnnnnnnnnnnnnnnnnnnnnnnnnnnnnnnnnnnnnnnnnnnnnnnnnnnnnnnnnnnnnnnnnnnnnnnnnnnnnnnnnnnnnnnnnnnnnnnnnnnnnnnnnnnnnnnnnnnnnnnnnnnnnnnnnnnnnnnnnnnnnnnnnnnnnnnnnnnnnnnnnnnnnnnnnnnnnnnnnnnnnnnnnnnnnnnnnnnnnnnnnnnnnnnnnnnnnnnnnnnnnnnnnnnnnnnnnnnnnnnnnnnnnnnnnnnnnnnnnnnnnnnnnnnnnnnnnnnnnnnnnnnnnnnnnnnnnnnnnnnnnnnnnnnnnnnnnnnnnnnnnnnnnnnnnnnnnnnnnnnnnnnnnnnnnnnnnnnnnnnnnnnnnnnnnnnnnnnnnnnnnnnnnnnnnnnnnnnnnnnnnnnnnnnnnnnnnnnnnnnnnnnnnnnnnnnnnnnnnnnnnnnnnnnnnnnnnnnnnnnnnnnnnnnnnnnnnnnnnnnnnnnnnnnnnnnnnnnnnnnnnnnnnnnnnnnnnnnnnnnnnnnnnnnnnnnnnnnnnnnnnnnnnnnnnnnnnnnnnnnnnnnnnnnnnnnnnnnnnnnnnnnnnnnnnnnnnnnnnnnnnnnnnnnnnnnnnnnnnnnnnnnnnnnnnnnnnnnnnnnnnnnnnnnnnnnnnnnnnnnnnnnnnnnnnnnnnnnnnnnnnnnnnnnnnnnnnnnnnnnnnnnnnnnnnnnnnnnnnnnnnnnnnnnnnnnnnnnnnnnnnnnnnnnnnnnnnnnnnnnnnnnnnnnnnnnnnnnnnnnnnnnnnnnnnnnnnnnnnnnnnnnnnnnnnnnnnnnnnnnnnnnnnnnnnnnnnnnnnnnnnnnnnnnnnnnnnnnnnnnnnnnnnnnnnnnnnnnnnnnnnnnnnnnnnnnnnnnnnnnnnnnnnnnnnnnnnnnnnnnnnnnnnnnnnnnnnnnnnnnnnnnnnnnnnnnnnnnnnnnnnnnnnnnnnnnnnnnnnnnnnnnnnnnnnnnnnnnnnnnnnnnnnnnnnnnnnnnnnnnnnnnnnnnnnnnnnnnnnnnnnnnnnnnnnnnnnnnnnnnnnnnnnnnnnnnnnnnnnnnnnnnnnnnnnnnnnnnnnnnnnnnnnnnnnnnnnnnnnnnnnnnnnnnnnnnnnnnnnnnnnnnnnnnnnnnnnnnnnnnnnnnnnnnnnnnnnnnnnnnnnnnnnnnnnnnnnnnnnnnnnnnnnnnnnnnnnnnnnnnnnnnnnnnnnnnnnnnnnnnnnnnnnnnnnnnnnnnnnnnnnnnnnnnnnnnnnnnnnnnnnnnnnnnnnnnnnnnnnnnnnnnnnnnnnnnnnnnnnnnnnnnnnnnnnnnnnnnnnnnnnnnnnnnnnnnnnnnnnnnnnnnnnnnnnnnnnnnnnnnnnnnnnnnnnnnnnnnnnnnnnnnnnnnnnnnnnnnnnnnnnnnnnnnnnnnnnnnnnnnnnnnnnnnnnnnnnnnnnnnnnnnnnnnnnnnnnnnnnnnnnnnnnnnnnnnnnnnnnnnnnnnnnnnnnnnnnnnnnnnnnnnnnnnnnnnnnnnnnnnnnnnnnnnnnnnnnnnnnnnnnnnnnnnnnnnnnnnnnnnnnnnnnnnnnnnnnnnnnnnnnnnnnnnnnnnnnnnnnnnnnnnnnnnnnnnnnnnnnnnnnnnnnnnnnnnnnnnnnnnnnnnnnnnnnnnnnnnnnnnnnnnnnnnnnnnnnnnnnnnnnnnnnnnnnnnnnnnnnnnnnnnnnnnnnnnnnnnnnnnnnnnnnnnnnnnnnnnnnnnnnnnnnnnnnnnnnnnnnnnnnnnnnnnnnnnnnnnnnnnnnnnnnnnnnnnnnnnnnnnnnnnnnnnnnnnnnnnnnnnnnnnnnnnnnnnnnnnnnnnnnnnnnnnnnnnnnnnnnnnnnnnnnnnnnnnnnnnnnnnnnnnnnnnnnnnnnnnnnnnnnnnnnnnnnnnnnnnnnnnnnnnnnnnnnnnnnnnnnnnnnnnnnnnnnnnnnnnnnnnnnnnnnnnnnnnnnnnnnnnnnnnnnnnnnnnnnnnnnnnnnnnnnnnnnnnnnnnnnnnnnnnnnnnnnnnnnnnnnnnnnnnnnnnnnnnnnnnnnnnnnnnnnnnnnnnnnnnnnnnnnnnnnnnnnnnnnnnnnnnnnnnnnnnnnnnnnnnnnnnnnnnnnnnnnnnnnnnnnnnnnnnnnnnnnnnnnnnnnnnnnnnnnnnnnnnnnnnnnnnnnnnnnnnnnnnnnnnnnnnnnnnnnnnnnnnnnnnnnnnnnnnnnnnnnnnnnnnnnnnnnnnnnnnnnnnnnnnnnnnnnnnnnnnnnnnnnnnnnnnnnnnnnnnnnnnnnnnnnnnnnnnnnnnnnnnnnnnnnnnnnnnnnnnnnnnnnnnnnnnnnnnnnnnnnnnnnnnnnnnnnnnnnnnnnnnnnnnnnnnnnnnnnnnnnnnnnnnnnnnnnnnnnnnnnnnnnnnnnnnnnnnnnnnnnnnnnnnnnnnnnnnnnnnnnnnnnnnnnnnnnnnnnnnnnnnnnnnnnnnnnnnnnnnnnnnnnnnnnnnnnnnnnnnnnnnnnnnnnnnnnnnnnnnnnnnnnnnnnnnnnnnnnnnnnnnnnnnnnnnnnnnnnnnnnnnnnnnnnnnnnnnnnnnnnnnnnnnnnnnnnnnnnnnnnnnnnnnnnnnnnnnnnnnnnnnnnnnnnnnnnnnnnnnnnnnnnnnnnnnnnnnnnnnnnnnnnnnnnnnnnnnnnnnnnnnnnnnnnnnnnnnnnnnnnnnnnnnnnnnnnnnnnnnnnnnnnnnnnnnnnnnnnnnnnnnnnnnnnnnnnnnnnnnnnnnnnnnnnnnnnnnnnnnnnnnnnnnnnnnnnnnnnnnnnnnnnnnnnnnnnnnnnnnnnnnnnnnnnnnnnnnnnnnnnnnnnnnnnnnnnnnnnnnnnnnnnnnnnnnnnnnnnnnnnnnnnnnnnnnnnnnnnnnnnnnnnnnnnnnnnnnnnnnnnnnnnnnnnnnnnnnnnnnnnnnnnnnnnnnnnnnnnnnnnnnnnnnnnnnnnnnnnnnnnnnnnnnnnnnnnnnnnnnnnnnnnnnnnnnnnnnnnnnnnnnnnnnnnnnnnnnnnnnnnnnnnnnnnnnnnnnnnnnnnnnnnnnnnnnnnnnnnnnnnnnnnnnnnnnnnnnnnnnnnnnnnnnnnnnnnnnnnnnnnnnnnnnnnnnnnnnnnnnnnnnnnnnnnnnnnnnnnnnnnnnnnnnnnnnnnnnnnnnnnnnnnnnnnnnnnnnnnnnnnnnnnnnnnnnnnnnnnnnnnnnnnnnnnnnnnnnnnnnnnnnnnnnnnnnnnnnnnnnnnnnnnnnnnnnnnnnnnnnnnnnnnnnnnnnnnnnnnnnnnnnnnnnnnnnnnnnnnnnnnnnnnnnnnnnnnnnnnnnnnnnnnnnnnnnnnnnnnnnnnnnnnnnnnnnnnnnnnnnnnnnnnnnnnnnnnnnnnnnnnnnnnnnnnnnnnnnnnnnnnnnnnnnnnnnnnnnnnnnnnnnnnnnnnnnnnnnnnnnnnnnnnnnnnnnnnnnnnnnnnnnnnnnnnnnnnnnnnnnnnnnnnnnnnnnnnnnnnnnnnnnnnnnnnnnnnnnnnnnnnnnnnnnnnnnnnnnnnnnnnnnnnnnnnnnnnnnnnnnnnnnnnnnnnnnnnnnnnnnnnnnnnnnnnnnnnnnnnnnnnnnnnnnnnnnnnnnnnnnnnnnnnnnnnnnnnnnnnnnnnnnnnnnnnnnnnnnnnnnnnnnnnnnnnnnnnnnnnnnnnnnnnnnnnnnnnnnnnnnnnnnnnnnnnnnnnnnnnnnnnnnnnnnnnnnnnnnnnnnnnnnnnnnnnnnnnnnnnnnnnnnnnnnnnnnnnnnnnnnnnnnnnnnnnnnnnnnnnnnnnnnnnnnnnnnnnnnnnnnnnnnnnnnnnnnnnnnnnnnnnnnnnnnnnnnnnnnnnnnnnnnnnnnnnnnnnnnnnnnnnnnnnnnnnnnnnnnnnnnnnnnnnnnnnnnnnnnnnnnnnnnnnnnnnnnnnnnnnnnnnnnnnnnnnnnnnnnnnnnnnnnnctagtgcatgtacactttattggggtgaccatgggctgtgtatgaaccttggagagtgggaaggagttttagagtgaatgcaaaatctctggctagagtttaacctactgtgcctcatttgtatggagaggcagtccaggaatcctaagtacctgcggtgtgggttcttatcaggaaagaagaagttgaacctgtaggcctattgatcttcctcaggtgggggcctggctccccagatgtggtcatagaagaggaagccttgctgggggaaaaaaaaaaaaaggagtcctctttttgctccaggctgagaggagctatctggtagactttgactttaaggagcagagttccccccccccccaccaccacacacatgccccacaaagaaaaagggagaaaaaaagaaaagaaacaacaaaaccaccatggcaaagtcaacctcataggagaagacagctcttcatgtcccctctctcacacatcttggtgactcacctgacagtgtctgctcgtggcgtcatccacagcaatcgtgttaacatttaaatgtagctgctgaggtagtctcttcagaggcccacagatatctagcttctaatagatgtggtgtaaagctaaggagaaccctgacattctctcagctcttttcagtcccacggcacagtacattttcagtgggaggccattttcctcaaccataaaatgtgtgcatcctttctctgcttgtagagagttcggtggctttgagatagggccccattcagtacttgctttcttaagccagccatcattttctgtaacagcccaaattctacaacacagcagcaggttgtaattcagtgaagattacattgtgctttgagtgctaattaaggcattcatagcgggcaacaaaatatgaacatcctgttcactaaacagaaccatggaaatggaaccttcttgtcttcctagaaaacggatgcttgatgatagggaaaatcaacaccaacgtagttagaagaaagtcactgagaagaaaactctggccctagaatgagttcatggagaaagagtctcattctacagggttcatttcactccagggcacagagttagaccccatagaaaaaggaacacagggcactgtgtgagaacttagggagatgtcatcagtgggaaggcctgttctgtctccagctgagtagaagaagcagaaacataggctagaagaggacacctatgatacctacagagaagtggacaagctagtggtcctcaatgatgcagcacttaattctaacagtgacaatcacagtagcagttcagtatacagagagggatgaagatggtcatctttaacccggaggctgcttttgacagttgagcctcttaaaggatccatttgtccacgtttagctcattttactagatgcaaataactgactgacttgttctctgaaaggtgtggttcccagggagtgctctcaaaagaacagttacagattttaagagaaactgtgagtttatcaggagttttcagtgtgccaagaggaagccaattaaggtagacttgcaaaatataatttaaagccacttagctgggactattattctctgggttttgagatatagtaatggttggggagtgtcttagtgtttcttttactgtgaagagacaccatgaccatagcaactcttataaaggacaacatttcattggggctgacttacaggttcataagtttagtcgattattatcacagtgggaagcactgtggcatgcaggccgacatgttgcttgagagttagctgaaagttctacatcaaaatcaccaggcagcaagaagagagagacactgggcctgggatcagcacttgaaacttcaaaacccaccccctagtgacacacttcctgcttcctccaataaggccacacctactccaacaaggccacacctcctaataatgccactccttatggccctctggaagtcatttttattcaaacctcctttctcacagagagaaaggaggctcctgtgtaccttctaattttgactctgagctggttatgagggagttaaaacacctctccactgcttatgttcattaaggcctcctcattcttcgtctttatgatgagcagaggcccagaagctcagcttataaaatgaaattaatttggaactgttatggataatctgtgtggatgagtgaagcttgatatatggaatatactaaaggaaatgctagtttgatgtttaaaacacatatttcatacgcagcaccaaagtggctagacacccgctccctcacagctgtgcagcagcagattgctctgctaatgaaccaataactcatccttaaccagcctcccttgcacaccagtggtggtattcaaatcaccctgatgtgtttaagtttgcattgctgttccagtagtcctcgaggtcctctctcctcactactaactgtggttccagcttcattcttaccagcttccccctactccccactgctcttttttggagctttttaaaaattatttcttgaaattatactataattttatcattttcttcttttctttccttcccatactatatctatatgcacatgagatagagagagcctaaatatataaatacaacctgcatagactgtataataatattacttgtatatatgctctattgctgcctgtttagtgttggataagcagttactgtgctctttcttaaggaagatgatttctcctactctgagtattccttacctggtgtgtgtgtgtgtgtatgtgtgtgtgtgtgtgtgtagggttgaggcctaatgagccttcccctgtccatattagcaaaatatcataactttatatttacaatgttaaaagttaacaggctaattcccaggtcctcggtgaacatggacttatatagactgtagggaggtaagtaggaccaccattaaaggaaacaaacagtatggagatgcctcaaaaactaacaacaaaatccaatatgattcagcaattctactgctggggacaacaggactatcaccctatgagagatgcctgtggatccatacttattcactacagctaaagctatgaactcagcctagatgcccatcagtggacgagtggatggataattttaagcagacagtatgtacatgagttattattcagtcatagaaaaagaaatcctaggctgatgagatggctcagcagttaagagcactgactgctcttccgaaggtcctgagttcaaatcacagcaaacatacgatggctcataaccatctgtaatgagatctgatgccctcttctggtatgtctaaagacagctacagtgtacttataaataaatctctgggatgcagtgagcggggcatgaacaagcagaggtccctgagttcaattcccagcaaccacatgatnnnnnnnnnnnnnnnnnnnnnnnnnnnnnnnnnnnnnnnnnnnnnnnnnnnnnnnnnnnnnnnnnnnnggaactggaagccttcaggtgaaatgcgccagtcacaaaaagacaaagatcaggagctctcattattcatggaaaggatccttggcctgaaaagaagagatggggagaagtaggtgtgagactgaggggcgggaggacttgacagggaaagaggcagataaagggcaacagatcagaaaggaggaattagttctggttttctatagcacagaaaggttacaacaatcgacgatgtgttacaaaatggcaggaaaaagaaggcacagaaagccagacacacaaaaataactcccccatttgatttattatggattctatgcatgtgccaagtctccataatgctcataactaggtacaaatgctttctctatttaaaataaaaaccgtagtagctaacgaggtagaagatgatttggtgagtaaattcagtagctttcctgatatattctcttttaactatcttggagtttagggagcctgatttcaacgcatgcttccatgccaaagacaaaaacagttacttgtgtggtccgtgccaaaggccattatgctttggttttcatttgtccttcgatcgcgtacctaagttcaggaaggacctatgggtggcttgttgttttctggatgttttcttccacttgtgagggtttgaaagacatttctacacaacctgtatttcatgtcttgctagatgctaggacctgttagttctcttcaaggccacgtacagatgctatttacctggataacgttgtgaataggcttttcttaattttccataaagaaaagctacatcttgaggtagaggaaacaccccctgcaaaaggtcaatgaaacctcaagttagtgtgagcactgcatcctgtcgctactgctgggccaggcagcttccaccgcagtcccttgttttttcttgtagaaaagccaagcaaggtctctgctttcactctctcaccagaaagagggcttttactgccttgtaagtgaaaagggaatgagaagagaggggtgggtagaaatgtcatcggggggcaggggtcttcccctggcattgtcttcctttagggagaatggcttcttctgcctggaaaggagtgatagatttcctgtgaagcctgggtggatagtggcaggtgggacaacagtgggacccgctgtctgtgccaggctagaaacagaatgtgccctttagtcagagcagtgggaaacccataaaagaaaaggaccaaaaagatttacaagtggggtttaaatgtgcagaaattaatcacatataatccgagggcagaggtgttaggcagctgtacagaaagctgcagaagttgttggaggctcaagtgagacttaggaggggcttccaatgtgtgctcggactctgaaggctgcaacgtgaaaagactccttcaggtacaggagaggtgggagttcccctatagttacagccctcacaaaggcccagcacctctgactaatgaatgcgcccaactgagcattaacttctacacttaagaaaaacattgtgcttaagaaaaacatttttctaattttcagttctattcagtgttgtgttgtgtgggtgtgtgtgccccatggcatgcaaagctgtcagaggactttatgaagtcagctctcttctctcccctttctgtgggttccagctttgggttgtgcagcaaatgctctacccactgagccatcttgccagccctaaaagagacatttctgaaactccgtttcctcaccttctcgtgcatctttctctagctttaaattccattgccaatgaaatagccataccatggatattcacacattgattgttcagtatttgcaagattatcggtgaactgagacactggccatgcctcaagaataatactggtgagcgttcttgaagctctaaaacatacccgcaacatactggatatcctagtgggggtttctatttctatgacaaaacaccatgaccaaaaaggttatttgctttatgctttcacatcactgttcatcgtcgaaggaagtcaggacaggaactcaaactgggctggaacctagaggcaggagttgatgcaggggctgtggaagggtgctgctttctggcttgctccttctggcttgctcagcctgctttcctatggaacccaggacccctagtccagggatagcaccacccacaagctgccccctccgcatcaatcactaatttaaaaaattatttaaaaccttacagctgaatcttacgctgtcattttctcaattgaggttccttcctttcagataactctagcttgtggcaagctgaaagaaatcaagccagcacactggagaaacactgtggagccttatagctccatttgcataaagtatagagaccgccacagttttaatatccattggggctaatagagcagcattttaaaatacctctttttggaaagagagggcggattagagagacatctcagtggttaagagcactggctactcttccagaggactcaggttcatttccagtacctacatggtgtctcacaaccatccataaccctagtcaagaaggatttgctgcccttttctggggtccttgggcaccaggcatgcatgtggctacacaggtgcccagacagacatatgtacacagttcataaccatgagcattcaaacaaacaaacaaaaaacaaataacaacaacaacaaaagactttccatatatatcacacataactgcatgcatttccacctctactttcagatacaaaatcaatgctgagactcccttgtccactagcatgtaactcagtgctgtcgttgtttgtgtcttgtttatgcagccatattgttacagtatcgtggatggagcttctttgtcctatttaggaaacacagtcacacaggaaacttcctattcctctggctcttacaatccttccactccctccatggtattccctgtaccttagacacagtcactggcaataccaagatcttgatcctaagagggaactgaacgtttgctgggaatcttcaaacagaagcacattgatattctgtgtaattgcaagaggctcttcctggggcaggtttgttctttctttttaatacattcaagttgtccacagaaccaagcaaaaccaaatagcttagcctcagaaataatagacactggcttcctaggggtcccagactagacggtttcctttgtatgtcagctttctcagttacagactgacaattcttctattgacctgctccataggtaatggctgtagtcttgcctagtagcttttcagctgacaaattagtgacctgctgagggtgaacaattgatgaagggtgacaatggaaaggcactttagctgctactacactcagcaaaaagcttcaatttattcagaggagaaagagctgctcctccctattgagtctaaacaaaggctctgctttttctcttcccgttccttccttccaggatggggatgtcagccttgggaaattataattggaaatccagttttgtttaaagacttaaagaagacttcaacttccaatccaacttgttacttgaataaatgtcatcttgatgaagattattttgcttaaaaagtatgccaagtagggaagtaggaagatggttcagcaagaggagtgttagctgtgtaaacacatacatgaaagctgggaggggctatgcatgtgccttgtaattctgatgcgttcaatgggcttcctggctgcaagaaacctgaggtctttctcttgactaaagcatggaactgacagtgtaatcagtcactacaggacaaagaaacatgacacaggcactgagctagctgaagaagtcacctctttctgtaggtaccaataactcagtattgtttctaaaggtttcataaaagccattttgtctccccaaacgaccaaagcacttctgtattgccagaagatacagaacccgaccccaagtttctccatggatggacctcaccaggtatcaggaaagttactgtccagactaacattgaggctgctcatcacgtgaatgtggactgtgtggaagccttgcttatcgtatgagtgtgagtgtgagtatgagtatcgtatgttcagaaacagcagctgcaaaaataaaataatgcataaaatacctgggtccttctcccctggctgttcttagactactagggaaggggactgtgcccttaggggattggtagaaataaaatttacgttgtggggatggaactccaaaccttctgggaggtagggaaagagataactgccagtcatagagccatggtaggaggtagagaggtatgcttggaaaccatctacctctgagaatcatacacacagtgactgagaggaaagcttcccagaaaagtaagttgatttctaccaagagctaggaggggttttcttgttagaaagggggaaagcatgtggagaatggaactgagaaccagtgtgaagcagagactggaatcggaactgagagctagtgcaaagcagagacggggattgcagaggaggcactgatgtcacccccttttgcaagccatgctcaccccaaggcaatcagtgcaggaatatgaagctcctgattggctcactttttcctcactcagtaattaagtgcctgtcatctacaagcattaaagttgtttgtctccatctgtgctatctcatgcaagacaaccagctttcttgaaagaaaaaaaaaaaatgtctaagctatacaacataaaagcatgttttttacaaagacacagcaatccaaagaaccacagccatacatgaaataggtatcgccacattcagattaaagaattaaaagaactatggccaatatatcaataaagttatcagaagaagtaagtccatgctgggacagacagacaattttgtgagagaggtgaattatgtagaaattttaagtgaaagttctagatcccaaaagtagacagacaacaaagaaatgggtcaactaggctcatcaggccactggacataactgaagaaagaatcagagaactagaccattggtcagtagaaactactcaagctgaagggacgaaggaaaaaaaaaatcctaaaagctaaaggggtcagagtccaaatgctgaaccatgtcaaagactggacctttggttgaattatcaaaaagagagaggaaaaaaaaactagacagaaaaaaaaaatgtctaaagaactaaaaggcttcccaaattgtcagacacagggaagcatgcctccaggaagtgagaccatgggggcatttgcaatgcaaagggaaatggccattcatcaccttctcaggctgctggagataaagagggcttatgtaaacaggaagaagaccgttaacacatctatgacaatgattttaacaatttagatgaagtagagtgtcttgaaagccactagctatcaaagtccaattaagaaaaaaaaaaaaaatgaccagaataccattactttgtcttctaaaggaattgaatcaaagataaataattcatatcacaaaaatgccagctgcagatggcttcacctgaatattctattaaatatttaaggatgaaacagaagcaattttgcataaactcttccacagcatggaagaagaaagaacttgccaacctctttcatgatgccagcagctcccagatactggcattagacagatagctgatcaggaagaccagttatcaacacagatgtgaaggttccaacaacccaaaagtagatcaaatgcaaccatatattaaaagataatatactgtgatcaagtagcattgatcccagaaattcaaagtcactttagcatttaaaatctgatcagaataatatatctgaatgcttaaaaagcattataaaattatctcaaaaggggtacagataatannnnnnnnnnnnnnnnnnnnnnnnnnnnnnnnnnnnnnnnnnnnnnnnnnnnnnnnnnnnnnnnnnnnnnnnnnnnnnnnnnnnnnnnnnnnnnnnnnnnnnnnnnnnnnnnnnnnnnnnnnnnnnnnnnnnnnnnnnnnnnnnnnnnnnnnnnnnnnnnnnnnnnnnnnnnnnnnnnnnnnnnnnnnnnnnnnnnnnnnnnnnnnnnnnnnnnnnnnnnnnnnnnnnnnnnnnnnnnnnnnnnnnnnnnnnnnnnnnnnnnnnnnnnnnnnnnnnnnnnnnnnnnnnnnnnnnnnnnnnnnnnnnnnnnnnnnnnnnnnnnnnnnnnnnnnnnnnnnnnnnnnnnnnnnnnnnnnnnnnnnnnnnnnnnnnnnnnnnnnnnnnnnnnnnnnnnnnnnnnnnnnnnnnnnnnnnnnnnnnnnnnnnnnnnnnnnnnnnnnnnnnnnnnnnnnnnnnnnnnnnnnnnnnnnnnnnnnnnnnnnnnnnnnnnnnnnnnnnnnnnnnnnnnnnnnnnnnnnnnnnnnnnnnnnnnnnnnnnnnnnnnnnnnnnnnnnnnnnnnnnnnnnnnnnnnnnnnnnnnnnnnnnnnnnnnnnnnnnnnnnnnnnnnnnnnnnnnnnnnnnnnnnnnnnnnnnnnnnnnnnnnnnnnnnnnnnnnnnnnnnnnnnnnnnnnnnnnnnnnnnnnnnnnnnnnnnnnnnnnnnnnnnnnnnnnnnnnnnnnnnnnnnnnnnnnnnnnnnnnnnnnnnnnnnnnnnnnnnnnnnnnnnnnnnnnnnnnnnnnnnnnnnnnnnnnnnnnnnnnnnnnnnnnnnnnnnnnnnnnnnnnnnnnnnnnnnnnnnnnnnnnnnnnnnnnnnnnnnnnnnnnnnnnnnnnnnnnnnnnnnnnnnnnnnnnnnnnnnnnnnnnnnnnnnnnnnnnnnnnnnnnnnnnnnnnnnnnnnnnnnnnnnnnnnnnnnnnnnnnnnnnnnnnnnnnnnnnnnnnnnnnnnnnnnnnnnnnnnnnnnnnnnnnnnnnnnnnnnnnnnnnnnnnnnnnnnnnnnnnnnnnnnnnnnnnnnnnnnnnnnnnnnnnnnnnnnnnnnnnnnnnnnnnnnnnnnnnnnnnnnnnnnnnnnnnnnnnnnnnnnnnnnnnnnnnnnnnnnnnnnnnnnnnnnnnnnnnnnnnnnnnnnnnnnnnnnnnnnnnnnnnnnnnnnnnnnnnnnnnnnnnnnnnnnnnnnnnnnnnnnnnnnnnnnnnnnnnnnnnnnnnnnnnnnnnnnnnnnnnnnnnnnnnnnnnnnnnnnnnnnnnnnnnnnnnnnnnnnnnnnnnnnnnnnnnnnnnnnnnnnnnnnnnnnnnnnnnnnnnnnnnnnnnnnnnnnnnnnnnnnnnnnnnnnnnnnnnnnnnnnnnnnnnnnnnnnnnnnnnnnnnnnnnnnnnnnnnnnnnnnnnnnnnnnnnnnnnnnnnnnnnnnnnnnnnnnnnnnnnnnnnnnnnnnnnnnnnnnnnnnnnnnnnnnnnnnnnnnnnnnnnnnnnnnnnnnnnnnnnnnnnnnnnnnnnnnnnnnnnnnnnnnnnnnnnnnnnnnnnnnnnnnnnnnnnnnnnnnnnnnnnnnnnnnnnnnnnnnnnnnnnnnnnnnnnnnnnnnnnnnnnnnnnnnnnnnnnnnnnnnnnnnnnnnnnnnnnnnnnnnnnnnnnnnnnnnnnnnnnnnnnnnnnnnnnnnnnnnnnnnnnnnnnnnnnnnnnnnnnnnnnnnnnnnnnnnnnnnnnnnnnnnnnnnnnnnnnnnnnnnnnnnnnnnnnnnnnnnnnnnnnnnnnnnnnnnnnnnnnnnnnnnnnnnnnnnnnnnnnnnnnnnnnnnnnnnnnnnnnnnnnnnnnnnnnnnnnnnnnnnnnnnnnnnnnnnnnnnnnnnnnnnnnnnnnnnnnnnnnnnnnnnnnnnnnnnnnnnnnnnnnnnnnnnnnnnnnnnnnnnnnnnnnnnnnnnnnnnnnnnnnnnnnnnnnnnnnnnnnnnnnnnnnnnnnnnnnnnnnnnnnnnnnnnnnnnnnnnnnnnnnnnnnnnnnnnnnnnnnnnnnnnnnnnnnnnnnnnnnnnnnnnnnnnnnnnnnnnnnnnnnnnnnnnnnnnnnnnnnnnnnnnnnnnnnnnnnnnnnnnnnnnnnnnnnnnnnnnnnnnnnnnnnnnnnnnnnnnnnnnnnnnnnnnnnnnnnnnnnnnnnnnnnnnnnnnnnnnnnnnnnnnnnnnnnnnnnnnnnnnnnnnnnnnnnnnnnnnnnnnnnnnnnnnnnnnnnnnnnnnnnnnnnnnnnnnnnnnnnnnnnnnnnnnnnnnnnnnnnnnnnnnnnnnnnnnnnnnnnnnnnnnnnnnnnnnnnnnnnnnnnnnnnnnnnnnnnnnnnnnnnnnnnnnnnnnnnnnnnnnnnnnnnnnnnnnnnnnnnnnnnnnnnnnnnnnnnnnnnnnnnnnnnnnnnnnnnnnnnnnnnnnnnnnnnnnnnnnnnnnnnnnnnnnnnnnnnnnnnnnnnnnnnnnnnnnnnnnnnnnnnnnnnnnnnnnnnnnnnnnnnnnnnnnnnnnnnnnnnnnnnnnnnnnnnnnnnnnnnnnnnnnnnnnnnnnnnnnnnnnnnnnnnnnnnnnnnnnnnnnnnnnnnnnnnnnnnnnnnnnnnnnnnnnnnnnnnnnnnnnnnnnnnnnnnnnnnnnnnnnnnnnnnnnnnnnnnnnnnnnnnnnnnnnnnnnnnnnnnnnnnnnnnnnnnnnnnnnnnnnnnnnnnnnnnnnnnnnnnnnnnnnnnnnnnnnnnnnnnnnnnnnnnnnnnnnnnnnnnnnnnnnnnnnnnnnnnnnnnnnnnnnnnnnnnnnnnnnnnnnnnnnnnnnnnnnnnnnnnnnnnnnnnnnnnnnnnnnnnnnnnnnnnnnnnnnnnnnnnnnnnnnnnnnnnnnnnnnnnnnnnnnnnnnnnnnnnnnnnnnnnnnnnnnnnnnnnnnnnnnnnnnnnnnnnnnnnnnnnnnnnnnnnnnnnnnnnnnnnnnnnnnnnnnnnnnnnnnnnnnnnnnnnnnnnnnnnnnnnnnnnnnnnnnnnnnnnnnnnnnnnnnnnnnnnnnnnnnnnnnnnnnnnnnnnnnnnnnnnnnnnnnnnnnnnnnnnnnnnnnnnnnnnnnnnnnnnnnnnnnnnnnnnnnnnnnnnnnnnnnnnnnnnnnnnnnnnnnnnnnnnnnnnnnnnnnnnnnnnnnnnnnnnnnnnnnnnnnnnnnnnnnnnnnnnnnnnnnnnnnnnnnnnnnnnnnnnnnnnnnnnnnnnnnnnnnnnnnnnnnnnnnnnnnnnnnnnnnnnnnnnnnnnnnnnnnnnnnnnnnnnnnnnnnnnnnnnnnnnnnnnnnnnnnnnnnnnnnnnnnnnnnnnnnnnnnnnnnnnnnnnnnnnnnnnnnnnnnnnnnnnnnnnnnnnnnnnnnnnnnnnnnnnnnnnnnnnnnnnnnnnnnnnnnnnnnnnnnnnnnnnnnnnnnnnnnnnnnnnnnnnnnnnnnnnnnnnnnnnnnnnnnnnnnnnnnnnnnnnnnnnnnnnnnnnnnnnnnnnnnnnnnnnnnnnnnnnnnnnnnnnnnnnnnnnnnnnnnnnnnnnnnnnnnnnnnnnnnnnnnnnnnnnnnnnnnnnnnnnnnnnnnnnnnnnnnnnnnnnnnnnnnnnnnnnnnnnnnnnnnnnnnnnnnnnnnnnnnnnnnnnnnnnnnnnnnnnnnnnnnnnnnnnnnnnnnnnnnnnnnnnnnnnnnnnnnnnnnnnnnnnnnnnnnnnnnnnnnnnnnnnnnnnnnnnnnnnnnnnnnnnnnnnnnnnnnnnnnnnnnnnnnnnnnnnnnnnnnnnnnnnnnnnnnnnnnnnnnnnnnnnnnnnnnnnnnnnnnnnnnnnnnnnnnnnnnnnnnnnnnnnnnnnnnnnnnnnnnnnnnnnnnnnnnnnnnnnnnnnnnnnnnnnnnnnnnnnnnnnnnnnnnnnnnnnnnnnnnnnnnnnnnnnnnnnnnnnnnnnnnnnnnnnnnnnnnnnnnnnnnnnnnnnnnnnnnnnnnnnnnnnnnnnnnnnnnnnnnnnnnnnnnnnnnnnnnnnnnnnnnnnnnnnnnnnnnnnnnnnnnnnnnnnnnnnnnnnnnnnnnnnnnnnnnnnnnnnnnnnnnnnnnnnnnnnnnnnnnnnnnnnnnnnnnnnnnnnnnnnnnnnnnnnnnnnnnnnnnnnnnnnnnnnnnnnnnnnnnnnnnnnnnnnnnnnnnnnnnnnnnnnnnnnnnnnnnnnnnnnnnnnnnnnnnnnnnnnnnnnnnnnnnnnnnnnnnnnnnnnnnnnnnnnnnnnnnnnnnnnnnnnnnnnnnnnnnnnnnnnnnnnnnnnnnnnnnnnnnnnnnnnnnnnnnnnnnnnnnnnnnnnnnnnnnnnnnnnnnnnnnnnnnnnnnnnnnnnnnnnnnnnnnnnnnnnnnnnnnnnnnnnnnnnnnnnnnnnnnnnnnnnnnnnnnnnnnnnnnnnnnnnnnnnnnnnnnnnnnnnnnnnnnnnnnnnnnnnnnnnnnnnnnnnnnnnnnnnnnnnnnnnnnnnnnnnnnnnnnnnnnnnnnnnnnnnnnnnnnnnnnnnnnnnnnnnnnnnnnnnnnnnnnnnnnnnnnnnnnnnnnnnnnnnnnnnnnnnnnnnnnnnnnnnnnnnnnnnnnnnnnnnnnnnnnnnnnnnnnnnnnnnnnnnnnnnnnnnnnnnnnnnnnnnnnnnnnnnnnnnnnnnnnnnnnnnnnnnnnnnnnnnnnnnnnnnnnnnnnnnnnnnnnnnnnnnnnnnnnnnnnnnnnnnnnnnnnnnnnnnnnnnnnnnnnnnnnnnnnnnnnnnnnnnnnnnnnnnnnnnnnnnnnnnnnnnnnnnnnnnnnnnnnnnnnnnnnnnnnnnnnnnnnnnnnnnnnnnnnnnnnnnnnnnnnnnnnnnnnnnnnnnnnnnnnnnnnnnnnnnnnnnnnnnnnnnnnnnnnnnnnnnnnnnnnnnnnnnnnnnnnnnnnnnnnnnnnnnnnnnnnnnnnnnnnnnnnnnnnnnnnnnnnnnnnnnnnnnnnnnnnnnnnnnnnnnnnnnnnnnnnnnnnnnnnnnnnnnnnnnnnnnnnnnnnnnnnnnnnnnnnnnnnnnnnnnnnnnnnnnnnnnnnnnnnnnnnnnnnnnnnnnnnnnnnnnnnnnnnnnnnnnnnnnnnnnnnnnnnnnnnnnnnnnnnnnnnnnnnnnnnnnnnnnnnnnnnnnnnnnnnnnnnnnnnnnnnnnnnnnnnnnnnnnnnnnnnnnnnnnnnnnnnnnnnnnnnnnnnnnnnnnnnnnnnnnnnnnnnnnnnnnnnnnnnnnnnnnnnnnnnnnnnnnnnnnnnnnnnnnnnnnnnnnnnnnnnnnnnnnnnnnnnnnnnnnnnnnnnnnnnnnnnnnnnnnnnnnnnnnnnnnnnnnnnnnnnnnnnnnnnnnnnnnnnnnnnnnnnnnnnnnnnnnnnnnnnnnnnnnnnnnnnnnnnnnnnnnnnnnnnnnnnnnnnnnnnnnnnnnnnnnnnnnnnnnnnnnnnnnnnnnnnnnnnnnnnnnnnnnnnnnnnnnnnnnnnnnnnnnnnnnnnnnnnnnnnnnnnnnnnnnnnnnnnnnnnnnnnnnnnnnnnnnnnnnnnnnnnnnnnnnnnnnnnnnnnnnnnnnnnnnnnnnnnnnnnnnnnnnnnnnnnnnnnnnnnnattttggttacttgagagtttcagtacttcctccaacattgctgtctcaagatcaagagatggacacggcaggacaactgggcccaccacagggtcacaaaccttttgccacaatctcacctggccctgctttggctgctttatggagatgaagctttagggacatggatctagagtcagacaaggatatcgtcctggtcaattgtgttttcaaagtctaacctgcggtttctctctaagggtacaatttcagtttatttggcacagccatgtccactggaaatggtgaaagccatgaagcctgcagctctttgacccagctccagcaatccccgtcattctgtctctcacttttaggttttagtctctgtgtgttgcatttttggagactttctgtgttgtcattcattttatgtcttttcctgagaaaattatgtctgtgtcttcttaggaaagccctaaaattactatcccttctgcttttagggaaataactttatttggccttatttggaagcctttcttatgccctggagaccataataagcaccgacaagcacaaagaagttagggatgtttagttgaggctatgatcccagggatctttggggggtatctgcccctacacaaactgaaacagtataattggaacagtgtaaccttagagatggttgacaaactctgactggccaggattcatcttcagacaggtcatagatttaaggcctctttttataatatgtatagaggtttctgaaaatgtagtttagacataggagatcatatagggcacaccccagagaaatagaactcagtaaataaggtagattgactaagtgtcttagtcagggtttctattcctgcacaaacatcatgaccaagaagcaagttggggaggaaagggtttattcggcttacatttccatactgctgttgatcaccaaaggatgcaggactggaactcaagcaggtcagaaagcaggagctgatgcagaggccatggagggatgttctttactggcttgctcagcctgctctcttatagaacccaagacaaccagcccagagatnnnnnnnnnnnnnnnnnnnntatctcagtggtattgtctagaaagatagtgtgagctttctaaataccaggacaccattataaagtatcagaaacctactacattgtctacaaagtgcaaatgagtgagtgtgcaaaataaaatatgcatacatgtagcacttactgattcgagagaaaacctatattaagccagacatgggctgcctcgatcgttcttgataggtcaaaggcagctgcaacataaaccgggctctgcagtgctgccttctatttcaactgtggaataaagaaacactgaaaaccagacttatcacattccttctagaatgcagaggggaatatagaagccacctctgcacagtggaaacttgcaggacagcattcttttgtgctgttatatattaaggaacattcatactgttcataacagtagaaccacaaccctgggtgcaaagacattggtgtaaacaattagtccctcccttaacgaacacatgagtgcctgccaaacccaaagcattgtgttaggcaaagggaactcaggaaagactaaggcatataaacaccaataaaggtgtccacatgtgtttgaggaaaaaaatagactaggaagggaggaaggttgggatgagacaaacttttgacatttatcggtttatgaaatacattcatgttcatttcacagctacttactaagcatataatatgatatgatatgatatgatatgatatgatatgatatgatatgatatgtgcatggcacagcatataggagctgtacaaaaaaaaatagcacagcccaagagctggcagataatcaagcatccggtcaactgaagctgtgccacacagcaggtgctggaatgaggttctacaatgcacagagcttaccttgaccactgatagatgccacccctagacctaagcccggagtatgacaggcacttgggaatatattctgatagagcaacagcgtgcctatgacccaaccagggaacagactcttctcctattcagtcctcagaagataccagtgtaaaccggtgagactcttattaacaccaccgagaagcaaactagccaggcctggaggtacctgtaatcccagtactgaagaggctggaggattgctacaaattcaaggtcagcctgggttacagagggatttccaggacagctgaggttacacaatgagactctgtctcatgaaaggaaggaaggaagagagggagatgaagggggcagaggtgggttgtggctaagatggaaaggaaaggagactaaaggtagaaggtatgctgatgttcttgggatatgtgcgtgaagtctggcctaaaccaccaacactctcacagtggcccccaaccagccctcgccaaaatgtgcttttctacaagagcaatgttcagtttaggaccccaagataaaacacaggaagttcttaactgaaacaaacctctgggtgttttgacacatttcagagcccagggacctttccagagataagttcctcagctgctccctggcacccggagccatgcctaacacagaccaaacaaggctgaggagatcgaatcatgtgtatgtatgatgttaatgatataggaaaatggataaagcacaccccctaaaatcaagctagaaacagtctggctgacgagagacaagcacaggcaattatatctctgaatgtgctaaataagataggaagcaaattttggaggtggattgtgggaagggttgtgcaatggtacaagtcannnnnnnnnnnnnnnnnnnngagctgcaaaattgattctgaaaactttgtacccgtgaagttcctacaagataagattctgagattttggttacttgagagtttcagtacttcctccaacattgctgtctcaagatcaagagatggacacggcaggacaactggcccaccacagggtcacaaaccttttgccacaatctcacctggccctgctttggctgctttatggagatgaagctttagggacatggatctagaatcagacaaggatatcgtcctggtcaattgtgttttcaaagtctaacctgcggtttctctctaagggtacaatttcagtttatttggcacagccatgtccactggaaatggtgaaagccatgaagcctgcagctctttgacccagctccagtaatccccgtcattctgtctctcacttttaggttttagtctctgtgtgttgcatttttggagactttctgcgttgtcattcattttatgtcttttcctgagaaaattatgtctgtgtctttttaggaaagacctaaacttactatcccttctgcttttagggaaataactttatttagccttatttggaagcctttcttatgccctggagaccataataagcacagacaagcacaaagaagttagggatatttagttgaggctatgatcccagggatcttttggggtatctgcccctacacaaactgaaacagtataattggaacagtgtaaccttagagatggttgacaaactctgactggccaggattcatcttcagacaggtcatagatttaaggcctctttttataatatgtatagaggtttctgaaaatatagtttaaacataggggatcatatagggtacaccccagagaaatagaactcagtaaataaggtagattgactaagataacttcctacttaataatgtagatgatgaaaggatacaagcaggaattaggtttagtatttgctattcctaaaagactggctcagatattttctatttgtctgaagcactacaaatgctgctggcctaaaagcaggctgtcatataataaatgtgtttgctttggtggaaacattctttagattttttttgaattggagttatagggctggtaataaaaataatttttttttctatttgtactttctaattgtgactgaacttgtaatcctggacctgtaatgaaaaatcaaaagcatgtccagaaacaaaatgatgtaatnnnnnnnnnnnnnnnnnnnntcacaaaccagacctccatcttctgcagtgttctcaacattatcttccaagctcctacacaacatctgacagagctcttaacaatggatggatcttcaagcccaaagttccaaagtccttccacagtcctccccagaacatggtcaggttgtcacaggaataccccactcctggtaccaatttgtcttagtcagggtttctattcctgcacaaacatcatgaccaagaagcaagttggggaggaaagggtttattcggcttacatttccatactgctgttgatcaccaaaggatgcaggactggaactcaagcaggtcagaaagcaggagctgatgcagaggccatggagggatgttctttactggcttgctcagcctgctctcttatagaacccaagacaaccagcccagagatggtcccacccacaaggggccttgcccccttgatcactaattgagaaaatgccttacagttggatctcatggaggcatttcctcaactgaagctcctttctctgtgataactccagctgtgtcaagttgacacaaaactagccaatacactaagataatttcctacttaataatatagacgatgaaaggatacaagcaggaattaggtttaatatttgctattcctaaaagactggctcagatattttctatttgtctgaagcactacaaatgctgctggcctaaaagcaggctgtcatataataaatgtgttggctttggtggaaacattctttagattttttgaattggagttatagggctggtaataaaaataattttttttttctatttgtactttctaattgtgactgaacttgtaatcctggacctgtaatgaaaaatcaaaagcatgtccagaaacaaaatgatgtaatctgcacttcttgggtagtcattagtctgttcttgttctgtgacacctgcaaaaataaagaagcaaactgattgctggtcagtcagagctgcaagactcccctgacctctgctcctgactcctcatctcctctcaggaactgtgtcaactgccggggctactccctggcatttattaatcaatattggaatgtgttagtcaatgttccattcagatcattgtgcaggaagtggtagcaagtactaagaatgaaaatggaagttgattggaatgttcataccagcttccaacttgtaagcgtaactacacaagagaaaatgtagctgagagtgttggacccagagactggaactttaaagatgccaaaaatatcattctaatttcacgagctctatgacatttttttaatgcctctaagaatcagatactggtggacagatgtccttttgttgttggtaaggtcaaaacggaaaatgtagtttaagatatgctctgtgtgtgatcaaacctgggcctccttccactcccctatcattgacttctccaaaattaaaggaatgtaccatccataaatctgtgggttgtttctatataaaatctcatttctgtgcaggttcaagatatccagaggctaggctgctgggctaaggggaaaaaaccagggagctgcctgctaagctcattaccagtctcactagatggcctcactctgccctccacaggaagaggaatgaggggtaatgagaaggtagaagttatagttctcaatacttccaaggaagtggaagcccttaatctttggaccaaagcaagccttgggtaaggtgggatagtgaggagaggagagcacgggtgtgagaatctggatagagaccctgatgaccaggttaccttgggagactgtaggtgaagattcagtcatgattcaccattctgtattttagacaaccttattagctatttttatgtgaatggctcatcatgctataatctgcagcctctttctctcaatttcccttaggaagcttccctggatattctgtttatcagcttgcaagagtgataacgtgagatgtggaaaatatcaaatcaggtgaatttgcctcttggaactaggaagagagagaagggcagtgccacagcagggcacagagggttctctgtgagtaatatacgcaagtgcagcaggtcattgcgtgtctgacagaagactatggatttactgaagagtgtggaggtgatggaagcaaggagccagctgttagccagccagcatgatctcttctgattcctgtttgcttaaaaggatggtggatcggggagagaaggagaaagatgatagcaaatgcttattattttatgtgcaagacttcaacctgtacacacacacacacacacacacacacacacacacacacacacacacaggtagatagatacatactgtggtggttcaaatgatatattccttcccacacagacttaggcagttgataaatctatttggggagggataagggacatagtcttgatagaggaagtatgtcactagggggcaagctttgagagctaaaagattcacccagttcccagtttgctctccacttcctgctggcagttccagatctgactgctcggctccactcaccatgcctgcctgatgcctcaattccctcactgtgagaatgagagtgatagactcttatccctgtagaatcacaaacccaaataaaccctttcttttataagctgtcttgatcatggtgttttatcacagaaatggaaaagtagctaatacctatatgtatatgcatatttatggatatgtatacatgaatatatggtcaagcatatatttgttttgttttttaaattaaaatataattacatgatttccccctccctctcatacctcattcctccaatttctcccatgttcctcccctgcttcttttcgaatgatttcattattagtgtgtgtgtgtgtgtgtgtgtgtgtgtnnnnnnnnnnnnnnnnnnnntgtgtgtgtgtgtgtgtgtgtgtgtgtgtgtgtgtgtgtggtgttgtgtgtgtgtgtgttatgcccattcagtgctgtttgtatgataatttttcagggattgaccacttgggatcagataattatttggggtgctcctttctggcaaaagctaatacttccctagcagattttgagttccctatagctctttctcggggaataggatcctcgaaatttccctcaagcacgttgcccagtcagctgggttcccgctgttcaggtcttctttaagtgaccatactgctgagatttcatgggtgtagctcctttgccatacacagaagactcaatcttacaggacacttcctctggctcttttcaatcttaccagcccctcttccacaatgtccctccggagcgagcattagaagtaaggggagtgttgtggatgcattgactggggctggacaccccacagtcaatgaatttcaacagttatggctttctgtggccgtctccatctgcaagaagaagcttcattgttgagggatgagagccatgcttgtctgtggctataaggatacgaatttacaataccgttgggaattgtaccaggaagtagcaggaagaggttctcttttgagatgtatagctccactagccacgtatggttagttgggtttccgggaccagacatgatttccctcctgtccaactggccttaaggccaattagaaagccgttggttgtttgcctgtctcttccattagttctactccttcaggcaggctctgttagtccatttggcagacataaaaaataggcagacatagaaaatagtgacttgggctggtgagatggctcagtgggtaagagcacccgacagctcttccgaaggtccgaagttcaaatcccagcaaccacatggtggctcacaaccatccgtaatgagatctgactccctcttctggagggtctgaagacagctacagtgtacttacatgtaataaataaataaataaatcttaaacagaaaatagtgacttaaatggtaccagctacctacttgggagtaagagaccaggacagtaggtgtgtttctgtacaggaagctgtcttagagctctcaaggtgctattatttattcttttatcacaggtaccaaagagttcaccttcaaggttgaaataaaatgaagctagacctcgcagtgattaacttttctgcagtaactcaaaatattaatcagcagctaactgggtacctggaagctgtccacacttgcagaatcttttgtctttgtcaggaattaaaaaaaaatacttgcttacatttttataaaattatgaaaacaacagcctggacgtgagccgatgataaattgagctatagtttggctagttgcagtaattagtctgaagtgcagccgacaatgaggctaatgcctctctactccctgtgatgttgacaagagcatccatcagatgcccgccctggctcctgtgctgcagacccttccagcctgattgatgctaagcttctactggtgtcctactgacaaggaatctcttcactctgatccctgccgtccaccaatcctaaggaaacagtaaatagaaatgggttttagctatgcatggacaaaggcagggggatcactgtttatccaaggtcagcctggtctacataacagcttctaggccagccaaggctacattgtgaaaccctatttcaaacagataaaaggtaaacaacaacaacaaaaaaagatttagtgtgctatcatgtttctcctaatttttacttaattttgagatgcagaacacctgatcagacaaaaggaggacatggaaatcaacagagaacttggccttcacctacatttgatctcttcagacatcagtttccttacacttgaggttgatgtcacgagaagtttaagaaagcacatatgttcatgatagtcaagttgcagatcaggctaggtatccaccagcagctcaacaggtgaaaaaatttggaataaatgcacaacacaatattatgtgacggcaagggagaacaaaggtggggccatttccatgaagtcaaatgcaacagatcctgacagttcatgacctgcatcactcaggaaaacaaatgtcatgcttttgcacattgtagatcttctgttttctgaggatctatgaaaccatatgatgtataagatgtgaaaagaccagtgagatggcctgccctaagtgaacggtgataacaagatagagagatatggaagggcaggacagtaaatgtggtccaagtacatgacagacttacgtgaaaatgtctctggaaaactcatccttgtgtgtgccagaataaaaggatgcctactaaagaaaatgactttaaactacagttgtgggagacatttgcagagtccccacaacacagtgaccaatgcatgtagcttcagtgaccaagaagctggttgagaggaggtcctagatcctatgaaacccaaatgcccttcaccaagcctcttgctccagcgccccagtgcaaacaagaaggagaaacattaggataaattgtattaggcaaaataagcactatattgcagcatattgattgtacagagtggtcacctgaggccttgggcccctcttagcaccatagaatagtttgcccatttcttggaaatgaaagaaaaatgacttcatccccccagaatacccctcttgcaagagtaagctgcaggtaagccgtcagctttttcaagatggtttattgaacagctgcaccacccatcaagcaacaactgtattaatcagctgaatgcctcaactgtaaagtcaggccagccagcaggatgtgtgctgaggttgaattgggtggagcatcaggcacaggcagtctctggcaggaaaaattggtcttgctgccaattttaacaattaaatatggctaccaccaatctactacacctttagatttgttttctctcatttacatatgttgaaatttaccagagtgaattcacgtagagaatttatgcagagtttgctttctgtattaaaaaaatctgcaagacaaaaagccagtttcaacactacatcttcaacagcaatctcaagccaatatgtattttagggttagaatatgaatggttctccacaatgtttgaacaattacttccaggatggtgacactatcttcagaggttgtggagcctcttgaacaagaggcctagctatcatatatatggccacagggaccataagcagcctagatctaacctcagcttcttcatctgtggagatgtgagaaaggtgggttacagaagccctcaaccctggaccaagctaatcccagttatggatctttccctaccacagttgaccatttccccatagactagagcccagataatccctactcccttgatttactgcccatcaggtatttggccccagcaatgaaaaaaatattgcaatatataataactagaaatgtgcttatgcctctcgagttttattctctgcatcttgagcaagtggggctgtgctttccgttgtgccttcagatcctacagttgtcagaaagacccaggatagagtggatctaggcagagcaaacaagagctccagaaacaccccatagttcatacaacagggggaaggggatgccgaggctttgcttaaacttagtcattgaaataaagaagccacagtaagagaaactctagaaggaaaagaagacagtgtgcccgcttgtatcttcacagtgagcatcaggtgaggagagtcggggggctaagaatgtttaaaaatctcacttccctccacttgatcatatctaatgggacaaatatcacgcacaattttggtgccatgaaataaacgcatttatctcatgctcctaatgtaatgtccccattttcctttgaagactcaccggatacccagattaaaatgggtggtggcacacatttcatgacaaactctatcacagaaaggggacagaaatatctcaagagcactatttggttttatgtgccagcaggcaagacccttctgaagacacggggcacttctctgtgcttgtcacgggcatcactactgctttcacttgttcactacccctggaggagctcgacactactgccaaacaacttgacactttaactaaagtgatcctgaatacccagcactttgtccagaagtaacttgtcgagcactgcacactctgctgctgcactggcctgtgacatggatgtagggaccaggtagtgccactgccctcagccaaaggccaacaggaatagggaggcagccagcctttgggaggtttgtgaggcatctcggtaaaggggttctaggatgtgttatggtttggggatttctgttgggtggtttggggaagtgcttgaggaagctttgttcatgattggatgctggtgggaggggatggagattctatgattggaagtctttgtaagtttcatctaactgtagaaaataagccagtgagccggcttggttgagggatgtttggtcattttcatggcttgaatgatgttcacatttgcatgtgtaagtggtgtgtgtgtgtgtatgtctgtgtgtgttcagttatgattactcagtcttgcttttagctcgcttcatccatgaatgcacacaaagtgaccttgtttgagacaatgttctattgttaatattagaattaatattagaatattagacatattctaatgtcaatactgtttgacagcaagctgagggctcggaccagatgccagaaacacaaaggcctggctgtggatggcatgccagccggtcctcgggtgtcacggtggcttttctctttctcagtgagggcttgtctacagtcacacagctaatgaactgaggggccacgatgctaaaacagttcttccttgtccctgagttaactcacatggtggtgatccaagcttatgaaaacgtcattttatctgcctgatttcccaggagagtccctctgagcttctcagcagaatccatggagagatgtgcattcagtctggagagcactgctgtctgctgatctcagtgagaccccaagcctaattaacttacctaatttcagtggcaactgggttccctcccttttccccatctctaatggagactgggcttttgctcacctaatcacaccaatatgaggaaacacagctaattgatgatctccagtgaggctcatttttagtgtatcatgattttatgatacatgttatttctcttctgtgcgtgcagagatgggaactgtgccagcttcaggaccggctaacagtagctggtcagaaattgtctattgtgtgcatgtctggcccttgaaataactgtcagtctgaaaagcaaacaagccctgttctaaccagatgctgatcctgagacgtgaatttaactgaacagtcttcacagtgcaggcacccaggaataacaaagctgaagacggtcatagagagaccacctggtgaagctagcctgagactcatctggagacttccacaagcctgacgttcaatcatcattaagaaagtctggccttcgatgggtcagtgagccatctctcctctgccaaagctcccaacacctataacaaggtggtggtgtagagcctaacacagggtgtgttttttaagtcatggactgaatggagcagatggtgtcctcggtgaatgtatcttgtagacacataaagcatgctacttacacactcagttagacacaccaatgattgtctctgaggacactgcagacggttaacttgccacgagaaatatttaagagttaatgtgaggtgctggagagcagtctcagcagccaaaaggtcttactgctcctgagtaggtttggtttccaacacccccataatggttcccaagcatctgtaactccagctcccagagagctgatggcctcttatggcctctgcatgaaatgtatgcagatgatgctcatgaaactcacaaaagaacacaagtataaaatcagaagattttgctttttaacaaaggggttgctttggcctgagatggctccgtggttaagagtgcatgctgatcttgcagagaacctgaataggttcccagcacctatgccagagaggctcacaactgcttataactttagctccaggagatctgatatcttctagactcctcaggcatctgcactcataaacacatgcccacatgcagacatacacatacacaaataatttttttaaaaagttaaaactgttactaagggttgtttctgtaaatctctgagaccaggaaacacatgtgaacatgaaaattgccctgtcagacattgccaaaacctgaggattgaaccacctgatttcagctgcccatgttttccacctcctctccatgttatagccaaaggaaaatccccaaatcacagcttgacaatatccctctccttgttatctgcctccccagggtctttagtaaaaacaccaaactgctcctcccagcccagaagttcctgggtcccaacatccttatcctctagttctgcccctgttgcctagaaacagatgtctgcacacttagagctgcatatccgttctgctcttccttcttagctctagccactcagctctgattagatgcccagtgcaatcggtgtctttgtatattcctgagccacctgcccacttaaacctttcattttctaaaccttaatgtatctgttcctctgactgtaatactcaatactgaagaaatactgctacaaacacaggcaagaacatgttcaaggatgttcgttttgttttgttttgttttgttttgttttgttttgttttgttttgtttgcactagcaagaaaatagagagaagtccttgagctggttaaataatctccatatatcaatttgtggttgttgtggacctagaaaaatgaagacaagtcagaacagatgaacatagaaaggctccaatagtgtgctatactgggatccctagcggtcaatggcatacatatccctacactgtggacagtctctcctagagaaagggatagataggtagggaatttcatattcctgggctgtggctcctcagtagctcaggactcccaaacaacccttagctgggagctgaagttatgtaaagcaggcacagcctgctcttttccagtcaaacttttacatgttactttgaataaatcagatacaatgaaaagttttcacagggtactgtagactcagaaaaagccactgcagtctttgtacatctacccaccactcacaaaacctgtagtccgatcattaacttgccactgattcattctctggcttgtaattttacttaactgtttggatttccttttccttctcttacactgaagaaatgggaacaaagaatgacctccgcggactctacggtacagggtgatagtctactaccatcaagggtgtgtgattttagtgagagtagcaagtgccatacttttattttccaaagtaatttattttatcacgtttaatttttaacagtgcagcctttgcctccctcctggtacccccttccatagttcctcatcccattcctccttccctcctgtctccaagaggatgtatgcctaccccactcccagacccccatcaggcctccctggagtcagaggttaggcgcctcttctcccattgagactttttaatgatggtaagcactgttcttatgtatactagccagtctgtcatagcaactgcagctatgcagtaaacatgatcacctccactttatggaagaagacactgaggtccagagatgaagtatattaccctaaaatcacagctctatagagctgaggccaatttctaggcaacttggctccagaatcggtgatgataaccactctgtgatgttgcaatggagggccattgtcttgctgcttaattgttcattttaaaaatggtgttgaagggaaaaatatgaaaagccaaatattaaaactgtagctggtaaaattgtctctgtaaaaggccaaatgcaaaaagggaggaaaagttctattcctgtacatgaacattttaggatacatttcttctatgtgctataatgtggttctatctacatacttccgtgtaacaaaaaaaatgcataaagagatgtctctgctacagcattcttatgaatttttttcctctgaaaaataacagcatcaattgcatcccacgttgatgctctcgattttaatttcacagatgaaagaactcggtgtcatcttctacaactgcagctgcctggtcctagatttacaaaggatattcgctttatatagctcattaaaattcaagagcagagtacctcagacctggtccaagagactctatggagtctatgacaatgagaagaagcttcagctccaattgaacgaaaccaagtcacaggcctttgtgtcggtgagtcttgctccttcgctgctacattccccaacttttgtcctccaaaggctgtgtctactggcctctctgactccttcaggctccctcacatcccaacctcatagcctatttctttctgtcttctccagttagtgctgcctatgggtaagatcgttattggctagaggaagggcagcataccaaaggcctttaaggaaaactgacccttcctcccctggacaccacgaactgccaatagcctcagctaagggtggtgccttgtaaaccctgcccccatcatggaatgttgactggtgggtcaatcatgcatgtcttacagataaccacaattgtaacgtgagttcataagtacaatagcgctgtcacatccggaagatactattgcttgacagaccccactgacctctggctcttaaaatatttctgcactttcttttgtaactttcctgagcttatggaggtggggtgataaagaagacactaaaaacttccggtggcacaaaatccatgacataggaaacaccatggaggcccgagcttcctgggctgatggataccaaagctgataagccctttatccgtgatttccagatgtatctaacagtagatccctggtaagacaaatctgaggtaacccaatatgtaaaacagacaaagccagtactgatgcttagagcaggccagcacaaagccaccccttatgtctgaggcttctctgactttggtgaagactaacaccgtatcctcacacccctgccccaacaaccccactacccatctggtcacgctgtcactaggaactgggaatgtgtatataatgtgtatatctgggcctccaaccctggtctccaaattctagaacaactaagaattagctagggagcattttacagtgcaaatttataggccccccaaagtcaccctggatctgacccacagaatctagggtggggcttcaccagtctgacctgggtcataatctcatgcttagcaagtattctctagaccaggttcccaagtgactgttgttctctgtccctgtagagataccaggatgctcatgccaaggactcttatgtacccaagagcatttacctgagagtagaaaacgacatcctctttaccttttcaaattaaagtacacatgacctgaatatacaaaagacactacaagatggtcaagagaaggttgaagttgtttgtctaaaataaaaaatatcacataaatgtgaagaacagaaaatggatatgaaggatttgaacggagcagtgagacttttttttgtcttcaaaaagttttaatttcttagtagaaaccatcaccaccaccatctttttttcctttatctttattagatattttctttatttacatttcaaatgttatccccttccctagtttcccctctaaaaaatccctatcccttcctccacctacaccccttgctcaccaacccacccagtcctgcttcctggacctggcattcccctatactggggcctagaaccttctcctcccattgatgaccgactaggccatcctctgctatatatgcagctagagccacaagtccctccaggtgttttcttggattggtggtttcgtcccagggagctctgggggtactggttaattcatattgttgctcctcctaggaggctgcaaaccccttcagttccttgaatactttctctagacccttcattggggaccctgtgctccatctaatgaatgactgtgagcatccatatctgtattagtcaggcacttacagagcctctcaggagacaagtatatcaggctcctgtcagcaagctcttattggcatccacaatactgtttgggtttggtggttgtttatgggatggatccccaggaggggcagtttctggatggtcattccttcattctctgctccaaacattgtctctgtaactcctaaaagcagtagcaagtagaagcactacatagagccttttagaagaagcacttccactgcacctaagaataacaatagtaccagaaggctgagtgaattcccattgtacagaagcagcaatgggggacaaggtgacaggattcctcaagcaagggatccagaaaactagatgagaggcaacaagaaataaattaacaaatgagcaatgctttgggcaatcgtgtagcttgaatttaaggggtgaatcttagagataagcaaggtctcaaaatacaacaaactaactaaaaacaaaccaaaagaccttgccatttcaaagggtttaactaaaggcccagggcaatctgtggtagctatagcaaggttagatcttcattgtctaacaaaatcatctccctctaaattaaaaaggactgaggtataggggaagaaaagagtccctcttcccaaatatgtttaagttttatataaaactgacaatagccagtacacttgtatacagtttagatatatgtgtgtgcatacatatgtatttgtatatgtgtatacacatgcataaataaacctagttttgagtaaatatcaagtcttacctctatttaaaaaaaaatctcaggaaagtcttaccataataactgggctccttgctctcaccctggtgtttaccaaaactttgtaattatttgtttatgatgatttccccataattctgtaaggctttgaaaattacatatcctctttataattgatatttccaggatccaactcagtgctttgaaagcagcaatcaatcaatcagtcaatcagcaaataaataaatattaggttgactttattggtagtgatattagtggaaagttccagaacatatatagctttttcagtaattgccaagcaaatgttaaagcaaactaatttaagttcaatatatttgttgtaaaaaaaaaaaaaaccttaaaatagtacttcatatttttggaagctggcagtcccaaaactaagttgaacacatgcagaaaatatctgaagatttgaagaattctcagccctaaaattacagttttgatcattgctagatcaccacaattaaatatcaatttccagttatgatatagagttttgatcattcataacttagctcagttaaatacaaattttcagttagaatatagatagggattatttttcattttctcttgaaccacaaattgattcttggttagaattacctaaatgacttctagtgactgggttccagataattgtaattatcgcatatctgaagtcagaaggtggaaatgagtgattgtataatttatgtcttgtagatttcttctcacagaccttaatgtatttgaaaaaattacatttgctttctagaacagagcttagtttgttcgcagtctgcttatattgatctgggtgtgaggtaggctccatttcttgttctttctctattcaaatgctcatctgtcatagagactgggctgtactcctgagaggaagacactcagaagaacttacatctgtcatgggaaaaaatacgccatattccttcttaaagcttccactttactttaatacttacactttagcatctttattgaaatacaagttagttgccatgaacttattccttttagagttccatgagctttggtgtgcccacaagctctgtagtcatcaacactctcaaatttcagaatgctttcttcaccataagggaacccctataatcataagcaactacatcctgttttcccctccctcggcctcggaaagctctaacccagaccttcatgtatgtaccctccctgggggatttttatctaaatacaacggtattacaaaatgtcttttgtgacttttttttttcaccttttctttttctccaagaagtttttagcatagggttgtagatttataggtagttcctttgattctttttctggctaaataatattgtattgtaaatatgccatgttttgtttgtctgttggtaggtgtttagtgtttctgtcttctagatctgtgcatatggcccctgtgagcactcttatccaagactctatctaaagacctcttttcaggtctttgggggttagtcttagaaatagaattgctgagtgatgatcatttgctttccaaatgggttgtgcccttctaaagtcccacccttagtgtggctgtgttcctgtcaacacattacttttgtctcacattaaccatcctggtgggtgtggcataagcatcactgtgcgctgattgcatctttcagttgtactcagtgtccactgggagacctcctggggaggttcaaaacattctccatatgtggcccttaacagaagggtgacttgtgaatcttttcttccattagggttggtttttctttttctttttttttgtctgtgtttggttatatctcagtggtattgtctagaaagatagtgtgagctttctaaataccaggacaccattataaagtatcagaaacctactacattgtctacaaagtgcaaatgagtgagtgtgcaaaataaaatatgcatacatgtagcacttactgattcgagagaaaacctagattaagccagacatgggctgcctcgatcgttcttgataggtcaaaggcagctgcaacataaaccgggctctgcagtgctgccttctatttcaactgtggaataaagaaacactgaaaaccagacttatcacattccttctagaatgcagaggggaatatagaagccacctctgcacagtggaaacttgcaggacagcattcttttgtgctgttatatattaaggaacattcatactgttcataacagtagaaccacaaccctgggtgcaaagacattggtgtaaacaattagtccctcccttaacgaacacatgagtgcctgccaaacccaaagcattgtgttaggcaaagggaactcaggaaagactaaggcatataaacaccaataaaggtgtccacatgtgtttgaggaaaaaaatagactaggaagggaggaaggttgggatgagacaaacttttgacatttatcggtttatgaaatacattcatgttcatttcacagctacttactaagcatatgatatgatatgatatgatatgatatgatatgtgcatggcacagcatataggagctgtacaaaaaaaaatagcacagcccaagagctggcagataatcaagcatccggtcaactgaagctgtgccacacagcaggtgctggaatgaggttctacaatgcacagagcttaccttgaccactgatagatgccacccctagacctaagcccggagtatgacaggcacttgggaatatattctgatagagcaacagcgtgcctatgacccaaccagggaacagactcttctcctattcagtcctcagaggataccagtgtaaaccggtgagactcttattaacaccgagaagcaaactagccaggcctggaggtacctgtaatcccagtactgaagaggctggaggattactacaaattcaaggtcagcctgggttacagagggatttccaggacagctgaggatacacaatgagactctgtctcatgaaaggaaggaaggaagagagggagatgaagggggcagaggtgggttgtggctaaggtgggaaggaaaggagactaaaggtagaaggtatgctgatgttcttgggatatgcgcgtgaagtctggcctaaaccaccaacactctcatagtggcccccaaccagccctcgccaaaatgtgcttttctacaagagcaatgttcagtttaggaccccaagataaaacacaggaagttcttaactgaaacaaacccctgggtgttttgacacatttcagagcccagggacctttccagagataagttcctcagctgctccctggcacccggagccatgcctaacacagaccaaacaaggctgaggagatcgaatcatgtgtatgtatgatgttaatgatataggaaaatggataaagcataccccctaaaatcaagctagaaacagtctggctgacgagagacaagcacaggcaattatatctctgaatgtgctaaataagataggaagcaaattttggaggtggattgtgggaagggttgtgcaatggtacaagtcacttgatgcctttggacatgactgaaatggtgaagatgggactggggatatagctcaggggtgaagtgcttgcctagcctaaggaaagccctggttcccacctgcccagggatggagagacaaagagaataaaggagggaggaggaaatgataagaaagggaaagtgccgggtgtggtagctcacgcctttaatcctagcacttgggaggcagaggcaggtggatttctgagttcgaggccagcctggtctacaaagtgagttccaggacagtcagggctatacagagaaaccctgtctcgaaaaacaaaaagaaagaaagaaagaaagaaagaaagaaagaaaggaagaaaggaagaaaggaaggaaggaaggaaggaaagaaaggaagaaaggaagaaaggaagaaaggaagaaaggaagaaaggaagaaaggaagaaaggaagaaaggaagaaaggaagaaaggaagaaaggaagaaaggaagaaaggaagaaaggaagaaaggaagaaaggaaaggaagaaaggaagaaaggaagaaaggaagaaaggaagaaaggaagaaaggaagaaaggaagaaaggaagaaaggaagaaaggaagaaagaaagaaagaaaggaagaaagaaagaaaggaaggaagaaaggaagaaaggaagaaagaaagaaagagagagagagagagagagagagaaagaaagagagaaagaaagggaaagcagcatatggtctggaatcacattgacaagagaggtagcctctggctgaagacctaaaaagaagataaatgtttaatggaggacgtacacttgagctggaagttagagagcagaccagcaggacaaacagggaagcctgtcatccagagggcccagtgagcgaatggccagaagtagaggtgaggacacagccacaggctggggacataaatggggtggaataacagtcatgggtactcatcccagggagagagaggagaccatcctgaaagccaggtgcacccttttgttaaaggcaaggcaatgggttgtgtaactgtacttttgactactttattggtttcttttacctaccatctttctccacccttaccccttccaacctcccaatacttggtgggagagaaaagggttagagggaaaaggggatgtctatctcactagactacttcttgctgattaggggcattgagttccttggggcaagttcaatcttgatcgtcacaatgtccaattccttcttctagtctctttgcttatgaccacttgacaaatggcagctataggagccagcagctgtggaggaagcagccaccactgcctctcttggggctctggcatttttatagcctctcaagagctcccaggattccaaatgtaagctatcttcagctggcagaatcacaccccagccagagcatgagacaaatcatagtcagctgctgtgaacaatctgaagtagccccatatcccacaccttgattaaaacagaaaacatattcacataacataactgggtttttaaagaaaccaaaatatcactatagggataggaagagcatttggtaccataaaatctcaacaccagggactgagtgatcctgaataagaggatcaaacagaccagacacccgaagatacagaagttctctgttccagtgaaagatgaagcatcattcctctttcctctctctctctctctctctctctctctctctctctgtgtgtgtgtgtgtgtgtgtgtgtgtgtgctggggaaagcacaggactgtccttgctctgatggtttttaaatacatctttcccactaaagaatggaagtttatcctcattctttctttctttctttcttttttttttttttttaacatccaaaggctttatcagctacaagactgaggaggtcagagctttcccaccatgccccatgtccagggcctgagtatcctcattcttaaagaaaaataattaatcagaagaataccctgcctatcactggccgagaggaccttattacctttaacactgctgtgtccaaatatctgctgggaacagcttaagggaggaagggtttattgcgcttacagttcaggcggaggtccattctcacggggaaggcatagcaacagggacacagctgctcacatcacatctgcagctgggaaacatcaaaagaggaaagttggatctcagcttgctttctcttgttatgcaatttaggatcccacccacaaaagagtgctacccacaggaaggatgggtcatttcacctcagtttaccgaatctaaaagttctctcaaacacatgcccacaagctcatctctttgatgattctagagcctgaccaattaatcaatattaactatcacaaggactttctggcaggagttcctggacagtgtgtgcccttaacgtgcacctatataactattttgccccttctgtcggaaggggtatccatccaagaaccttcattctgtgaaccatgcagttgaattggattcctaccaatgcaggatgtggaactgtggacaaatgacttgggaaatgttattgttcagctcccctttatccaggcagttccagaaacttttatcctttcttttgtgcctctatgcttaacacaggcaacttcttgtcagataaaggtgagacttataggaaagactgtttccaatcctctccgctggaaaaataatgaacactctgaagtatgtcttcctcttgctacactaactccacctaaggaatgaatatatatatatatatatatatatatatacatatatatatatatatacatatatatacacacacacacacacacacacacacacacacacacatatatatatatatatatatatatatatatatatatatatatatgaagtttagatgtatgaaaaatacccccagcatcatttttcctcttttttcattttgctgatccttgtcctctgcctctcttgatggattcgggcatcacagtaacttccgttttccttggagggttattgatggcattctatacaatcagcattcctcttcctaaccctatgaaagatccagggataaaaaataagattttaaaacttgtgccggaatgtttttatagccaatatcacttcccagatgaaatgacttctagaataaatttcttactatatgtgtatatgtctgtaaattatattttagaaaattcatcagccacatacaatagggagaggttcctagaatcaaataagattgaagtaggttactctcaaaggagcaagacctgcactggaagcaaaaatcccctcttgagacagatttcaaggacttgaaacaaatcccgcctcaggtttgacaaaacacaaagtatctttgttgtaatctgatcaagaaaccaaatggggggttgaaatagcatgtagttaacaatataccaagacctaccaacacaaatgaaaaacacttcaaatgtttttaacgttgaaatacctactgctcacctctaacatcttgggttttgtatcttcacagaactctcctaaactcttttgccctaaaaacagaagctttgacatcgatgccatctacagtgtgattgacgatgccaaacagtacgtgtacattgcggtcaccgactacctgcctatctccagcacgagcagcaaaaggtcagggactttccgacctgtaccgtgtggtcctccggcctctgggctctgagatgctgtcaggctgtatcaggaagagcacactctcttccagtgcgcctcgtgtgcatctgcagttttcccatcatgcctttcttcccctggtgtgtccaatttaaatgctcagagtctcacgctacaggagtgcatcactagtttatcccacaatcacaggaacagtctcagaaagaaggtttgggtaattaatagaaaatcgtatccttctgtgctctcaatgcgaaggtgaaggggatttaaaacacatgctttcagagagcgggcccttctgaatgagaaggctatctttacggtgggtaacttctcagttcctgtttgatcacacagtaacttggaaatgattcagggacaggagatactacacagctccaggaacaataatcacacataacgcggaaccatgcccaggcattcccgctcttgcttgctgtaagggcagatctttgggtgcttgtcagtgtattcaacaattaagtttaaccaggaaatgctttccaaaatgcatgttttcgaaatcatcatccagaaaattataatttcaaaatagccatttagttagcttaaatgattaggtgtgccaaatattacctgaatactttttcatcttgccaatcccacatgtgcataatatgtaccatctttatgcaaatggttgcaagagtgcaaaaagcctgccagaaaaaaacatcactttatgacagcaggaaagcattttgagctgtaagagcacattattaagacagagctactttaaaatattatctgccttttgaatgttcatggattttcccacacactttcccattgtcctcctttttatgcccctctcgtttcttgtttatttggcattagcctaaattttagatatctgcttccctcgggaaacataactaacacatggtgcctggttgtcctgtgaccaaggaggatgggggaggctagtttatggagttctaggatgatgatggccaagactaaaactttgtcccatggcctcccatgggcaaaccaggtcttccatagggtgggaggttgttgatgggtggtgatacacacttgtaaccacagaccttgggagcctgagacaggaggttcatgagttgaagatagtttaaagccaggctaggctacagggtgaaatcttgtctcaaagagactaaaatcttacaattaggggaatatgtaaagaatgttaaaaggccagagaaactgaaatgtttcggagccaaactgaaatctcctatcttaattatttatcattcctgctgttatttaaatacttctggtagtgtgtgtggagatactatgatgcaactcactgttttgtgtggtaaccttaagaaaataatttaaaaaaagaaatatttattcacctcaaatatagtaagactcaacaaaccaaagaaagcttccactaaactcagctcagcaaataaataagcttactggggctacctacacagatgtggatggaaacaaaataaaatatcaagcttatactcagctttctaaacaaaagagaaacgcggagattagactcagattataattacattcttctcaatcatatgaatgcattttattcagaaatcaatcgggccttgtgtttatatgaccctaaaaaagaaaggttcaaaggcaaattcagtgtgtttgtagaactaattaatatctttgacttaaaatttagtttcttcagtgccaaatacctaaatgaaaggtggtaagtcatgaactcttgagtcagaaatgatctaaatatacattgtctgttggaaaggatattggaagttctgcctttcaggataacagagagtctcatagtgaagtaataaatcctgcaaaggggaaaaaaaaaaaaagcataagcccagacagagagcccttgcctaacatttgcaaggttctgagtttatccccagtatcacaaaccaacaatgatggtcaaaaataagaaataaaagcaagtcacaacagcagatatgcatgaagatgccataatgaaacctgttaccttggatgcttaactaaaatgttatttttttaaattatattaaaaaaataaaataaaagccagactttggatgcaaactccgcagccagtcccacaacacccaaggcagctccacccccaggggctccaacatgcccaggatcagaggtgaggaggtgaggaggacacaacatctgtccccaacaccgggagtaactggtactggtgggaatcaggcatgcaagaactccaccagaccagtggcacaagttccttccagtcagtctgggccagagccctgagcagaccttgggcacaaactctggagccagccccacaacacccagagacagctccactcccaggtgccctaacatgcccagaatcagaggatcccaggatcccaggagtttggtcacaccaggatctcaggatcccagaggcagcttgactcccaggagctcgggcatacacaggatctcaggatcccagaatcccaggatcacagagacagcttgacttggaggagttctgacacatccaggatcacaggaaggataggctccagccagccatagccaggccaagtagcactagagataaccacatggcgggaggcaagggtaagaacataagcaacagaaaccaaggttacgtggcatcatcagaacacaattctcccaccatagcaagtcctggttaccccaacacatcagaaaagtaagatttggatttaaaatcacttctcatgatgatggtagaggacattaagacggacataaacaactcccttaaagaaatacaggagaacacaggtaaacagatacaagcccttaaagaagaaacacaaaaatcccttaaagagttacaggaaaacacaatcaaacaggcaaaggaaaggaacagaaccatccaggatctaaaaatggaactagaaacaataaagggagacacccctggagttagaaaacataggaaagagatcagaagtcacagatgtaaaagcattaccaacagaatacaaaagatagaagagagaatctcaggtgcagaagataccatagaaaacaatgacacaacagtgaaagaaaacgtaaaaaaacaaaaggctcctaacccaaaacatccagtaaacccaagacacaataagaagtccgaacctaaggataatagccatagaagagagtgaagattaccaacttatagggtcagtaactatcttcaactaaattatagaagaaaacttccctaacctaaagaaagagatgcccatatgcatacaagaagcatacagaactccaaatagatgcgaccagaaaataaattcctcctgtcacataataatcaaaacaccaaatgcaccaaacaaagaaagaattttaaaagcaataagggaaaaaggtccggtaacatataaaggcagacctatcagaattacaccagatcttagcatagactatgaaagctagaagatcctggccagatgtcatacagaccctaagagaacacaaatgtcaacccaggctactatacccagcaaaactctcaatcaccatagacagagaaaaaaagatattccatgacaaaaccaaatttacacaatatctttccacaaatccagccctacaaaggataatagatggaaaacaccaacacaaggagtgaaactacactctagaaaaagcaagaaagtaatctttcaacaaacccacataaacagaattccacctctcacaagacaattaacaggaagtaacaatcacttttccttaataggaaaattaatatcaccaacatatcataatcaattgaaattcaaaaatatgagaaattagaaatttgtcagctgtcatctcgtggtctctctaatttggtaatgggagaaataggtccaatattttccaatccatccacactttctgcttgtttgtacaagacaggctcttgctgtacgccacataatggtcttgaaatcatgcttctccttcctcggcctctgtattagtaggattgtttatttgatgtttttatattctactatggttttcagaacagcttacatatttcaaaattatttatacagccaaattaaatgtagacaattaatttgggaggtggcttgtaagagaacagcaaagagtgaaactgaaggctttgcttgataattataattattatatcaattttgaagaagaggactttataagttactctttttctgagatgaatgctttacaaattcaccacagccaatgaaccagaatcttaccttcacctaatgtctgtgccaccctccaagcagaaccattgttcattgaaatagttgatgaataacttcatggctagaccatcttaatacacacaccatttcttaaatgaatgtaacctgttccctgcaggctgagaataatggcaatcactcaagtcaaatagctttgaccgtagcaggaaatctgtatccaaaaatcgtgcctacaattcattccttggcacagcagaactgtcaactcttagcttagctactatggaggtaaaatcctttggtgatgagagggatgttgtagtacagccttattacaatgaactccaatgtccaaaaactgttcttattttgtgtttgtaccacattaagcgccaagattttaagctccactaaaaacaaaacaaacaaacaaaaagactttacctctgttcattaaaaaaaaaaaaaaaaaaaacctagagtgagttccaggacacccagggctgcacagagaaaccctgtcttgaaaacaaaaacaaaaacaaaaccacctgtgatggttcttctcggttgtcaggctgactctctctggaatgaactacaaatccagaaatgaggggcacacctgtgattttctgtttggtggagtgggtagatccacttctagtccagactttaggtaggaaggaacacctctgagccacatcttgaggcaggaagacacaggcttttctttaatcttttgtttgtttgtttgtttgtttgttttggttttgtttttggagacagggttttctctgtgtagtcctggctgtcctggatctcactctgtagaccaggctggcctcgaactcagaaatctgcctgcctctgcctcccaagtgctgggattaaaggctgcctctgcctcccaagtgctgggattaaaggcatgtgccaccacacccagcactttccttaaatcttaaagcgggcagacacacctttaacctgtgccacaccttttgctgaagcctatataaaaacacggatgaaggaaacttttgccttgctcataaatccgtttcttcaccggcattagagcctactttttcctgattctagaccagctgagacatccagccttgtggaactaggcaactactagattcttcgactttctggacacatctagttactctccaattagctggactgcagacctttcccgaggtgcttagcttctagagactcagaaagcgccgagagaagcaagatggcggacgtgctggatcttcacgaggcggggggcgaagatttcgccatggatgaggatggggacgaaagcatccacaaactaaaagaaaaagcgaagaaacggaagggccgcggctttggctccaaagaggggtcccgagcacggatgcgggaggattacgacagtgtgaagcaggacagcgatgaacctgggccacagcgctctgttgaaggttggattctctttgtcactggagtccacgaagaagccactgaagaagacatccatgacaaattcgctgaatatggggaaataaaaaatatccaccttaatttggacaggcgcacgggatacttgaaggggtatactctagttgaatatgaaacatacaaagaggctcaggctgccatggaaggactaaatggtcaagatttgatgggacagccaatcagtgttgactggtgttttgttcgtggaccaccaaagggcaagaggagaggaggccgaagacgaagcaggagtccagaccggagacgccgttgataaatcctctgttgactgggtggtctctctacaagtccatttggttatgctgccttggattaaacagggctagggcggaccttgtgtttatatttaatttcttaccctatctacttggcattgcttttgagttttagaaaaaaataaatgatccattttcttttctaaaaaaaaaaactaatagcgatatattattttaaaatatcatacagttagtatacttggagttatttaaaatttatattgaggcaaacatatgtattttcagtattgctgtagacaaacatctacataagactgttcaattgattgttgttttatatcaaacaacttttgtactactcattcttattgttataatattttataaattttaaagaatatgataaaaaacaaaaggtatttcaggttttgaaggggggctctccaggaggagttggggtacaaaagggaaagaagaatgtgatgtaagtctatttactgaaaatatgtttttaaatgttaacaaattcagatgaattaaaattaggtatcttatcatcataatgcaataagcctaaatcaaaggaaaaaagaaagtagaataataaaataaaataaaaatatagataaaaataaaaaaagcagaaaggctgatttcagctgttcctgataagcagacaagcactctttctttaagtgattcactgcctaggtcccagcttagagctgtctctggtttctcttcagtcatgtgacatgcatctttcagaaggagataggtaaatgtgtgaaggactagtaaaatgttatctgatttacctttaagcttcaataaccctctccttctgcagttaaccagagtctgaaaatatcaaatggaaagttgcagaaaaaaagcaatttgtggagggggatgaatgcaatcaaaatatattgtatgaaagtctcaagaagtaataaaacagtgctttaaaaaagaatttatgagttttaaatagattttatcatagtatattatattgctaaaattgtattagtcgttattgccaattccttttttgctgagtctgcacactgaagagcagttttccaagcctccacttgagtggaagtgagggggcgaggcaggtgctctgaatacggggaaactactatgctaactactttccttcatatgaatttaacaaatgtctgttgacatgtgtgcatttatgattaaagcatgaacatatgtgatccctgaaatgccacctgaagggggcagaggggcacaagggagattattagaacacagatatgtgtatgggactgaaggtgtgtccagagaacaggaccctgaaaagcacccacaatgccatgacaaatttagagggatttttccagatgaaagggacagtataagcaagcattaagatgaagaaaaagggctgccaggttcagtgttggattgcaaagcctaaaaagtaaaaagtaaggccctggaaaaccacactggagagaaggcagagatgggagtagagggggcagcttgctagagagtctcaagatttgggagaggctctggtgttctaataaaaggagtaacaggaccatgcttgcttttagacagtcatgtgggtggtcacaggaataagagtcgaggcacaggaaccattgtagaacacaaggctgaggtgcctgttcccagtagtccctggaaaccgacagaaagaatgctagcaccacccaagatttaagtcatacagggatcaagaggaaggtggagggacaagtgccctacaggtgggcataactggaatggagttgtccaacaagagagacaaggagctggggcctggagatcataaatctgcaccctgcaggactaaaggacaaagtgcatgtgagaagagagggaacttccagggcaggagggtcagatacaaacagcagccccctggagatgctgtggttagaacactgacaggccatggtgcacaataacatggcctgagtccaaacagtgactatgcctggaatcaaggcaatatttgaatccctacaaagaggtgagagaagacagcctgatttgaggcccatcaaatgccctgatttgtcttaacatgacacttctgaagtgacttgatgggaaatagagagagcagaagggtatacgcacaccttaagccaaggagccaaatggtaatagaaacacacagcaagagctgagaagccatgccttctgtaagagttagagtgggaaaaggcttaggtgacagaggaaactgatggaggatgccagcgtcccacccagaggaagggagctgtggaaggctgggttgggaagatggtgctaaggacagtctgcaacatgggacagcttaggtaactaaacagaagtccattggagaccggatggtattatccgacatggggatggcatgacatgcagtacaaggtatgcaaggctcttagctagaattccgctcaaaagtaaatgcttacaccacaatgaggcctgaatagcgctgaaggtctagtgaagacaacccagagtggtgaatactagatctatatagcttcatcctgtggacccgagaccttctataaggcagtaagaggtcccagaaaagcttcctctcttagtgtctaacttcaaaggcctgtatcatcaatctatcccacaaaacggttgccacgatgcagaatgaaataatgcgcaaggcaataacaaaatattccattgccttgtaaaatttctttcacggatagttttctccatttgttcttctgcaggacttactggccagatttagatgggaagataagagaagcattagttttacgaagcgttaaagtccggctgctcataagcttctggaaggagactgatcccctcacgttcaacttcatctcgtctcttaaagctatttgcactgaaatagccaactgcagtttgaaagttgtaagtgttataatgaccgtgtgattcaataaaaaaggcttattccctttgcatgcaagctgttgatgcactcacgcacatacatccacacacgcacatgcatgtatgcacatgcacacacacacacatacacacaggagggggccatgtagaggccagaagtcaatatcatgtctcttcctcagtaactctccaccttactgttttaaggcagggtctctccctgaacctgaagcttgctgatttggcttgagtagctagtcaccaagcaagctctcgggacttcatggctccatctacccccaggactaatgttattgacagctgcttgccaaactctatgtggatgctaggaattcaaactcagattttcatgcatgcaacacaagcagtttaccatcctagccacctcctcagcctcctcagccccttgcagtacacacttcatctgaactgcttcatttccctactgaccttatttgtaacacggacaaagagttgaatcacccatcaatacacactgacccctgcccgctgtcacactcgtccagactcctggccttgctccaatctcttgtgtcgcaagctaatccacctcgggatgcctgcaggaaagcaaggtggggaactgctggttccttgtttctgtgacgttttgtcgctacctgacaagaaacaatttaaaggaggaacaattgatctgagtccacagttccgtggtgactaggactcgtgccatggtctagcatgaattgataatttaacttgttccatcctgctctgtcatgaagtacagatatgggactgtttctagggataagatgtaacccataaattccactcctgcccacaaacctacctcagataggcccgcctcttaaagcttccccatcccccaaaaataatgccacccactaaagactaagtgttcaaacacatgagcccatgggagacgtttcacattcaaaccatagaacacatgaaatgtgcgaccttaactctcaggttcttctctgagttttcttgcctcctcccctcaggacctttgtgtgttctttcttctcctacaacaccctcttccaccttcatctgactggtgactattaatcgtttaggccttagttttcaaaccaagtctcctatgcactcaacagctgtgtgttgagaccacactctctggcaggcctgcgcttccggaggcatttgtccacacgtgatgacagagtctttgaagcatccttcttgagtcagcttccagcaagtctctgaccctccatatcccagagacagaggagagtagtggaagacttgggtttaggcctagaggtggtttgcatcttctcagctttgctccatttacagacatcattcacaggctgataccaaagggcaagggaggcttatgagctgtgcccacccagacaaaggactagacttgagggttatcctggtaagacagtctcggcaccagctatatgtttcccttcttcccacagagaaccctagagtttccattcctgcctctgtacaactctacttaaacttaactgtttaatttttaaaactgaagcagacactccccccatgtcaatgagttcataaatcattgtaagcgttggaaatatgaaaacaagtcggtgattaccacgaattatctgtcttgtaggtcagatttaaaagcatgtacgacatggccatagtatggaagctaactggaatgtgaagccaaatactggggatggaagcagaggttaataacagggagccaagcaaggcctgaaataccagctcagctgtgtctgatacctcttcatagagaagagaatgctggagtcaattcagcttggggacagcatcctccagaaaactaaagtggcattcaggactccagggaagtcagatgagcagaaaccaggtgtctagtcactatctacctaatgcctggcatgaagctagtagtgttcaaaatatgtgctaaactggtagattcacaaatgaaggcagtaaaagaaagggactgggaaaggcagtgataggagaggctctgtcatcagtgaggagagaagagagagcctacagcaaggtccaggtcttttctccccagtgagactcactgtggatgtctgcagaaacatgggtggcaacttgcttacaggagcatatgcccctaaaggaaatgtctctcccatcctccatcagccacaaactgcttataaatcatcagggaagggtggaaccatgcggtcccattcccccacacccctacccacacctcacttccaaaacagagtgttgacagacccagttttatggaaatttttgtgcacattatcacaactttttctttttcaatttcaaggatttaacagtcatgtcattgccaaaaaaaagtaaggattttttccacctctccctgctccttctcccagctcttacattcttacatactttctgatggtcctggtgccttgaagtatagaatctatctatctactgggcacttaatagtcatttctcctcaacactttggtcagttatgtgtctctgtattaactactgaccactgcagaaaaaaaggctcagcagaccaaagctgattgctacactaatctgagtgcacaaacatagctatttagaaggcaacttgacagacacattatgctcattaatcaaaacaaaggcaatagctttcctaatagggtatgtgcctcccaagacatgggcctttgtctgggtttacagtaccagatatggatttcctcctgtggatcaagcattgcccagagttttcttaattgtcttctatgacctggtatccccagtgtgcatcacacatcctggaggtcatttagggaaatcagatgatctgctgtcaagtttatgagatttccaggagcttgtgcatacagccccgtacattcactcccacggttactcttgatcgcccttcaggggtcttccccaccatgctgctttctgaaccacagcgtgcttgaatctaaggccgttgcatttgaaatcctacaaggaaaagaaaaatccatgatagtagcccctgcaaaattccatcagcttcaccatttggacacagatggtcatgaatcttgaatcttgaaaccatacattaatagctcactgctggccattttatgaaacagaggccatgtatttttaaatgtcaagacaagcctgggtgtaaaggcaacttatggccctgtcatctaggacacagatggctggtgagcacttaaaagaaaagtagggtatagaactttggagacagtatgtcttcaggaggcacggagccctgacaagacagatagatgacctgggagcgagcgggatgctctgtctctggaaagtagatgcttacatcacctatgcagatgtggctcagtatcgttgaggaaaacagaaagactgctgcttggaagattgtcacagtttagggctacagaaatggctcagcaaataatagcatgtactgctcttgcaaagaaccagagttcagttcccaacatccacacaaggcaattcaggtgacttacaaccatctatacctccatctcaggagaattagacacctctggcctctgtggacactgtacttaatatatgcatatacccacacttcaacatacatacatataattttttaaaaatttaatccaaaataatatttatcatggctgacttgaattagtttagttaataaattacccaattggtacccaattctttttgctttaaggcctctaataatgtcagaggctctcctcatctggtttctactacctcgtcagtctcccagataaagttcagagtagagtattgggtaaaatttggaacattagtgatcacaggttacccttccctcagcataaaccaactctcattgtctctctgaaccaaataggggcgggccaatcttggaaattacacaaaatcatccatgaagatccatctcccacggatgccctctgccgcttcttcctcccagcctgcagaggctagggctgaaaggcattctagaatccaagttttccactgcagtggagacctgagatccttgtctccaatgtgtatctcctcctcccagctcagccttcacagtcccacgggctcattcacagtggacacttaatccaacactgaccgaattgctaaggcctttcctctctatagatcatttcccatattcctccagttgggccttgggtgaattagactgctaattatcgtcatcttcatcatcaacctcatcatcatctttgtcatctggagtcacactgacattagaattacatagtttgtaatttgtgcattttttatttatttattttttagttgcccattcaaaaaaaagtcctgtaggcttaggtgttccaactatttgttcttgtggcaaaatctcttttaacctttgcagattctcaggtgaatcagctagtcgttgacataatgtatgtagtggataagaatattcactcagttcgttgtcatgcctggcacacagtgcctgggggctgctgccaatgccagtgcgccctgctgaatacgactgtgagaattaaacagctttctatccctcaccctgctcagaaaatgaattttgtgttcatttgttagcttcacagagttaattatagagctagttgaacatgctaattttctttgttgttgccctatatggatgaagagtaaaaatagcttcctctataggatgtaacgagagtgtcattttagtaactcaatatgaggtctattgttgatatttggataatagactcctttgtgcttgtgaacaagaccgaaaacattctcaattgacctgctttgcgttcttacttttctcttgtcttacagaaattttttgatctggaaagagagaatgcttgtgcaacgaaagaacaaaagaatcagacctttcccaaattaaaccgcaacaagtacatggtgacagacggggcagcttacatcggtaggtgtgggggttgagaagcccctcgggggtcacagtagggggagctgacaccttggctgtagccactgaggaggttgtgcaggtaagaagcaggagactggagccaagagcttttcagtcccacagacgcgttcccctgtactggggcatataaagtttgcttgtcccatccagtggaagaaagatagcattttcaacaaatggtgctggcacaactggttgttatcatgtagaagaattcaaatcgatccatacttatctccttgtactaaggtcaaatctaagtggatcaaggaacttcacataaaaccagagacactgaaacttatagaggagaaagtggggaaaagccttgaagatatgggcacaggggaaaaattcctgaacagaacagcaatggcttgttctgtaagatcaagaatagacaaatgggacctaatgaaactccaaagtttctgcaaggcaaaagacaccgtcaataagacaaaaagaccggggctggtgagatggctcagtgggttagagcacccgactgctcttccgaaggtccagagttcaaatcccagcaaccacatggtggctcacaaccatccgtaacgagatctgactccctcttctggagtgtctgaagacagctacaatgtacttacatataataaataaataaatcttaaaaaaaaagattactttaaaaaaaaaaaaaaaagacaaaaagaccaccaacagattgggaaaggatctttacctatcctaaatcagataggggactaatatccagcatatataaagaactcaagaaggtggacttcagaaaatcaaataaccccattaaaaaatggggctcagaactgaacaaagaaatctcagcactttctgttgagagtttcacaacctcctttatctccaactccagtggatatgacatcctcttctggcctccatgggtactacactcacatgcacatacccatacacagacacagatatacacaattaaagataaaataaatttttttaaaagaagattgtttgccaggcatgtggtacacactttttaaactcagcattgaggtggaggaggcagatggatctctgtgagttcaaagcaagtatgatctacatagtgagttccaaaacagccaaggtaatatagaaagactctgtctcaaaaaaaaaaattaaatatgtaattgtgattgttttacattataagcacattcaaaggtgattcaaaatgggattgcttgaatttcctggcttttctcagtttatggaaaatagaatgaaactagcttttgtttggttgcttggttaggttttgattttgatttttttttaaagacagggtttctctgagtaacaagtcctggctgtcctggacttgctttgtagaacgggctggcctcccttaaactcacaaagataaacctgtctttagtttccaagtcctgggattagagacatgcaacactactcctgagcttttgttttgttttgttttgtttttgaggcagggtttctttgtgttgtcctctctgtcctggaacttgttctgtaggtcaggttgacctcaaactcacagagatgcacctgtctttacttcccaaggcatgcatcatcacaccagagcaagctcctttttctttttctttttctttttctttttctttttctttttctttttctttttctctttctctttctctttctctttctttttctttttctttttctttttctctttctttttttctttttctttttttctttttctttttcttttttcctcttctttttcttttcttttctttttcttttttaagcaagtggcaaagaacagagagatggcttagcagtttagagcactcaatgttcttgcagagaagatctgggttaaattcctagaacccatgaagggactcacaatatccagtaattccagttctagggtatccattgcccttttctgacctttgaggacaccaggcacataaattgcacacacatatatatacatgcaggcaaaacatttaatatttatttaaaatattaaataaataagtaataacaaccataaaaatttgaaggcaagcaaagaaccaccaaaattgcttatgaaaaaatagaagcttctagataatttatctaaaactttgggatgaatccaggtgtacttaatggcttaagacccccaaatcaagatattttattgtagcattcattaaaagtaaggtgtcatgtgcacattcagtgactctttaatcaaagaagaaaacagaactcaaccaagaccacatgggctggcagtagattgtaaactaatgtttattggtcttgaaatgactcacctgatatacaaacatttcttggacaaattaattaagtgtttggggaatcagagaaatctgtatttgaattatagcactgacacaaactgggagacagtagcaatccatataatctcttgtaagcctcagtctccctatctgtgaaagggggataatagcacccaccctttgatggtgtggtgattaaatgagataatatatgaatggctccaaacaatgactctggagtcttagtaaacataggataagacattattaaataacttcattttataggcaacagttttagtaaaacactgatctctagaaagaagcagagttccaatacaaaaacattcaaagcatgtcaaaaggaaattaactcattgatagtgtggaaccaagaaaaaaatctcaggacatgggagtataactccattaagtttgtatgagatgtcccgaagacacttcagacagcatgatctttctcattttatagtctccaccagtgtatctgagttaagcttggaaattttgtttggaaggtgtctgagcaactagacagctaaggaggggtggggaggttaactgaaggtgctcaaagatgcctaaggctgcctaccaagaagctgagctctctggcaccctaagacacacacacacacactcacacacacacacacacacacacacacacacacacacacacacacgagagggggggaggggggagggagagggagagggagacactacattctggatatttcaacctttataaccttagtgtgcattctggggaactaaaatagtctaaaaaggtaaaagatttaaaaaaaatgtagcccagcttcaaaaaaaattatggaggcatatgtcaccttgaaggtccgccaaaatttgtgtcagcatgatgcttcccagagctgtcatgaaagaagccaactaaggcatttgcaatccacaaacaccatgcttttggctcattctctgtatggcagggcaaaggctagatttacaggctaaggccccaaactcctcacccgcctccatcctcctttctcttcccagggatgcccctttagtatttacctatatgtgtttcctccagaaaatttcatccgccagtgcatagagcagaaatctcagtatggctgcttcaatgccccagaccctgagctgaagtcattgttcagggtgaagtgggcagaggatgcctttagggtcaaaggtgaaatgcagcctctggacttaaatttggctttgaacttcagctccaatagttctctgtgaagcaccattggttagccataaaacatggggaagctgtagggatctctgtgaacatttcctttctcatggcaaatccctcccatcatacaaaatattggacataaacacaagtattatgctttgcccaaagtagacagttagtaactcaaggctggtctcccctcagactcccttgcagcttgactacaaccccaaatattccagacttccaacctgatctcagaccacaaggtgtcgctctcctttcctggaatctggatctctcttgtcctagttaagcttgagggtgtctctcatttactcagggcacagcttcttcttgacatattgagccagggatggaaatccttctctctggtgcttgggtatgaaatcccagtgtgctctttcttaccatctctgttgtagtgactctttctggaactccgtgaaggcaggaaccttcattttcagttttatatctacactcttaatatcggacccggtagacattgggtaactcagtgaacagcacaggagaatgaagatccaataaataattagcactgtccccctccaaggacagaccttggttttgacaccaaagagaaatacatgggaggtgagccatttcctgtacctttgttgtactggtgttctatggttatgaagaggaaccatgaccaaggcaaatcttacaatggaaagtatttaagttgggagcttgcttacagtgtcacaggcttactctattatcatcttggtggaaagtatggtagtatgcaggcaggcatggtgctggagaagtagctgagaactttacaacctgaccctatggcagcagacaagcagacagagaaagacactgtagcctgttgtggccttttgaaacctcaaagcccacccctagtgtcttcattagggtttccattgctgtgaaaaaacaccatggccaatgcaactcttataaagaacatttaattggggccagcttacaggtgcagaggttcagtacattatcaaggcatggagcatggtgctggaggagctgagagttctgcatcttgttctgaaagcaaacagaagactggcttccaggcagctagaaggagggtctcaaagcccaacgccacagtgacacactttccccaacaacgccacacctcctaataagtgccactccctgggccatacatattcaaaccacgacatgtagtgacaccccacctccaccaagaacacagctcctaaaccttccctgacagctatccaactggggactaagcatgcaaatacatgagggccatttttcttcaaatcgccctagccttagagatggattcagcactaatagcattgtcattatcagcttcttctgagatgattccaacctcaaaattcatctgtggaagtcctggtccctagtatgagagaaggtgatgaaagaaaatcactctcaagagaggtcattaaggtgggcattaatctaatgtggcacatgttctttaaacaacaacaacaaaagcacagaggaactgtgtacccatagtgccccctacctgtaattccagctctcagaaggcccagggggaaggattgctgtgagggcgaggctatatagtaacatccggcttcaaaagaaaggaaacaaggaaggaggctggataagggcacccatagaggaaagacggtatggagagacagggagaaaggggccacccagaaggagacgaagttgcaatgcgtcctttccatcctagtttgcttccccactcccatgatgaacaccatgagcaaacgtagtttggggaggaaagggcttgtttcagcttgcagattatgatccatcaagagaaggcaggagcttgaagcagtcaccacaggcacaacactgcttactctcttgatctcagaactcatggccagctacctttcttattcagtccaggccaacttacacaaggatggtgatgcccacaatgggctggaccctccgacatcaattagcagtcaagggaataccccatagacatggcgagaggctaatctgatggtggttgttcttcctagaggtgtcaagttggcaacaaaaagtagccatcatatttcttgtagttctcagaaggaaacaaccttgatttttgtctccaaaggcataagagaacatttcttccatttaaaacaactagtttctggcactttgtgaagaaagctctgagaaaaaccaaatcagccatcaatcctggccaagcctccagtcctaccctggggagataccttccagtctccttagggaatgctgtagtcatatctctgccttctgctttgtctcagtggtgaagcatctctgcataataatgtttatgcatatggattcgatgttgtctctttgagaaggtagtaattgttcacaggatttttaagtgtattcctatatattttaaatgttgctgtatttagtgtgtcttgtgaacatcaataagaaataacatttacaggaaaagaacagcagatttcttgttttgagtttcgacttgagcgaagctgaagaaaatgccaaaataatatgcaaatattaatctgccatatgtggagcttctagcaatttttttcctcgggagctgtcatcaggattctgcctctcttattattttgggtgtttgtttgtttgtatatatatatatatatatacatatatatatatatgtatatataatctgttctgtatttcattatagtgggacttttcccagtggaccgtaccttctcatcatcatttctttatttgtaggaaattttgactgggtagggaatgactttacccagaacgctggcacgggccttgtcatcaaccaggcagatgtgagagacaacaggagcatcattaagcaactgaaggacgtgtttgagagggactggtattcgccttatgccaaatccatacagcccaccaaacaaccgaactgttcaagcctgtccaaactcaagtctccctccaagcaacctgccatggccaatgccaccgggagggagccgctgagcgtatag

SEQ ID NO: 312 - DNA, 1540 bp, Mus Musculus
tgtgattgagctccgcagccctccgtgtttgctaaaatgctaaacgaggggcccgtggctctcagagcatattccatgggaaatgccgagcacaggagctgcagtcctcttccttcacgctcgggctggctgattgccagagcatcgaggccagcgattaagggactgaaatataatcggtggtgatacatttgcaccaccacatgagacctgctctgcctcggagggctccagtgggaagcagcagctggggcagctagactctgcaaggcaggaagatctcatcgcaatgtctcagcagaagtgcatcgtgatcttcgctctggtctgctgcttcgccgttctggtcgctctcatcttttcagcggtggacatcatgggagaggatgaggatggactctcagagaagaattgccaaaataaatgtcgaattgctcttgtggaaaacattcctgaaggccttaactactctgaagatgccccgtttcacttaccgctcttccaaggctggatgaacttgctcaacatggccaaaaagtctgtggacatagtgtcttcccattgggacctcaaccacacacacccagctgcatgtcagggtcaacgtctctttgagaagttgctccagctgacgtcgcaaaacatcgaagtcaagctggtgagcgacgtgaccgcagattcaaagggtgctgaggtgacatacatgaacatgaccgcctacaacaagggccggctgcagtcgtccttctggattgtggacaaacagcatgtgtacattggcagtgcaggcttagactggcgatcgcttggacagatgaaagaactcggtgtcatcttctacaactgcagctgcctggtcctagatttacaaaggatattcgctttatatagctcattaaaattcaagagcagagtacctcagacctggtccaagagactctatggagtctatgacaatgagaagaagcttcagctccaattgaacgaaaccaagtcacaggcctttgtgtcgaactctcctaaactcttttgccctaaaaacagaagctttgacatcgatgccatctacagtgtgattgacgatgccaaacagtacgtgtacattgcggtcaccgactacctgcctatctccagcacgagcagcaaaaggacttactggccagatttagatgggaagataagagaagcattagttttacgaagcgttaaagtccggctgctcataagcttctggaaggagactgatcccctcacgttcaacttcatctcgtctcttaaagctatttgcactgaaatagccaactgcagtttgaaagttaacgctggcacgggccttgtcatcaaccaggcagatgtgagagacaacaggagcatcattaagcaactgaaggacgtgtttgagagggactggtattcgccttatgccaaatccatacagcccaccaaacaaccgaactgttcaagcctgtccaaactcaagtctccctccaagcaacctgccatggccaatgccaccgggagggagccgctgagcgtatag

SEQ ID NO: 313 - protein, 416 aa, Mus Musculus
MSQQKCIVIFALVCCFAVLVALIFSAVDIMGEDEDGLSEKNCQNKCRIALVENIPEGLNYSEDAPFHLPLFQGWMNLLNMAKKSVDIVSSHWDLNHTHPAACQGQRLFEKLLQLTSQNIEVKLVSDVTADSKGAEVTYMNMTAYNKGRLQSSFWIVDKQHVYIGSAGLDWRSLGQMKELGVIFYNCSCLVLDLQRIFALYSSLKFKSRVPQTWSKRLYGVYDNEKKLQLQLNETKSQAFVSNSPKLFCPKNRSFDIDAIYSVIDDAKQYVYIAVTDYLPISSTSSKRTYWPDLDGKIREALVLRSVKVRLLISFWKETDPLTFNFISSLKAICTEIANCSLKVNAGTGLVINQADVRDNRSIIKQLKDVFERDWYSPYAKSIQPTKQPNCSSLSKLKSPSKQPAMANATGREPLSV

SEQ ID NO: 314 - DNA, 436348 bp, Homo Sapiens
  misc_feature (1)...(436348): n = A,T,C or G
gccggcgagcggagcgcccgctcgggaccgcagccgccgggcgacgtcgccgccgcaccgggcacttctgtctccccggagcaggttcctttccctccctgtcccctctcgtcccccttctccccgtccgtccccctccgtccccgcccccgcccccgcccgcacctcgccctccctccttccgccccgcgcctcccgcgatcgccccctcccgcccggccgcgctcccagctggcgctcagcaccccgcgctccccgcgcccgctcgctcctccagctcctccagctcagtctccagctccacctccggctcccgctgggcctcccgctcgccctccgcgcccggctccccgcgcgcccgtcccgagtccgctgctcgccggcggccgcccggtcatgtcaggatggagatccggcagcacgagtggctctcggcctccccccatgagggcttcgagcagatgaggctcaaaagccgccccaaggagccctccccaagcctgacccgagtgggcgcgaacttctacagcagcgtcaagcagcaggactacagcgccagcgtctggcttcggaggaaagacaagctggagcacgtaagggcgactcgctcccgggggcctcggccaggcacctgccgcatgcaccctccccgtggtggtggcatgagcgcgcgcggggcgcggggggcaggcgaggggatcctggcaggcgccgacgtcctaggtcggattcgggggcttctctgcctgcagtttcttgccttaatgaccgggctgcggggaggggagggcaggttccctttcaggctcttggtccctgccgacccgacctgcccacctgcgtctcccggtagggttcatttgcacggggttctggaggtgcctgtgcagagtgagcacgaaggggaagtgccaccagcgtggctccgagcaacctggcgttgcatggtagtgggctttagagcggcgtttgcccgcgtctttgggggctgttttactcagtccaaaaactagcaaattaacgaatgagtaaagttggcgccgctagcgaccagcgtggacccgcgcacaagccattagagttttttgcagagtgtccgctgggatgagcagttggtgatcctctctacttgagcccaactagggagagatttgcgcgttgcaaggagaaaggctaaaagcgagcggatcgtcgggctccccagaaatcctcccctctggagggtgggagccggtgagaggggacctctactcccaaggagtgccgacttcacgcgaagtgaattggctctggagttgagctcctaaggcttgctattttgaaagaaaaaaaaaaaaccttctaaaaaggcgtttagtggatccacagtttcaaatttgatccatcagcatcttcttaaaccaaatgttaaaattaaactaagagaattatctcaagagtgcagcacaactagctaaggagaagatgctatttctccctgcagagctgcagaatccaaattgagtctgctaatggaatgtggaggtttccttgtatttgggtcaggacgccaacaatgataaaaaagataagaccaagaactcctggaactcacgcatttccaactgctgcaccgacctgcttcccatctgccccccaaagcactcctcctgggctctgcagcaccaacaggcttcttcccaggaggaaacacgcgaagaaggggcatttctctattataataatctgaaaggaaggtctgtgcctgctttctgagggcctgatgaagtcactgaaagctctaatatgaagctttgagttggataacagcactattttatgtgtagagagccatttgctaatgtcaaagggatgcctcatatccttaagaccatggaagtcgctgaaggtttctaggatggcaagttgtttgaaaggcaacgtatccattaaacatgccctctccagaattagtgaaggggctggtggtgttattagtttaaagggggcaaacagcatctttatgcattacatgcaaagagcatgtaatcaaccaatgatgtggctgattttagtatcagggataacagtctagccttgggagggtgatagaacgtatcttcgttttagtttcactctgaatgtatgttcttttgcagtttgtgcttttagctggtctatttcctttattctcttactgaaaatcagtggtgcagccttctatgactatgtcttgagtcatgagcggtgcacgcattatacttaaatgctttctcacttttagattttcattgaaagtatcaagtcataccatgtgtgccacagcagtctcacctttctgcatgagtatgggatgctcagcctcctctgaggattggagaccagggaaaggaagatgtggttatttgaaagcgtgtgagcatctatgctttcttcttcactcagatactccaaaagagagcattgcatacatttttaaaaaaatcattctcctcatttgatatttaaatcagtgtagcatttgttttactttttcaactacatttaatgagagatgcatatatctattctgatgtttttctctacacaccctttcaattagaaagggggctttaaataaatttcttggtggtattctcttgctcctttgaaacatcacgaacatttttaatgaattaatattaaagaaagtgctatgaaaaattaaattagtatacaatataaatttttttgaattcaagagctagttgtttataatatacgtcatgttgaatgcactataatatttcaggtagtttgatggtaatttctaatagaaattaatgtttgagatgtcaaaaacctataacaaatgtaacctggtatcattgctacagaaagcatgaaaatctaatgttgacttcattgtaaacaacattctgaacatatatggtaccttctgattcatatgttgcagggattaggatgagtgtgtcatgtgaaattcaaaggtgatatatggtagtttaaaaacacccttctggtctgtctaatcaaatggatggccacttttttatgatgttgaaaaaataaattaataattatgatggagatcatatgcctgaaaacagcctactcagttattttgctggtgctttaaaagccaatctaagtattaaggaaataaataagttatgacttcaaatgacacacatatttggtcatcataataacagaattcccctgaaatgaaatgtggcagtgtgtgggctctgtccagacttcagagggatagattaatctgaaagtcaatcatgtgagataaagcagacaaccaaagaatggatttccacccactttgctaaaagtgagaataatttatttcttcttttctgatttaaaggctgctgggccaattctcaggttggacaagaaaaaaatgacctgaattagttgaggattggaatcaatctttaaatatggttcctgtcactggatggtcgacacttaagatgaacacttactaagaaataaatgtttatagggaatcattccatactaaaataatgaataagaagctgcgaggaagtcgtgttttgtaacaagaattctggactttgaattccactgtgaaatttcaggaaaaagtaaaattgctggccatacacagaatgttgtattattagttacaaataatgctcttggttgttaaaatcttttgtttcctgttctgcttcataatgtccagagctttggaaggcattaggcttgggaaacagtggaagttctgttctctgtaggatcctgtatttactttaggtctaatgtaaaagtgaaggattctggtccagcaaagcaagaggagcaagggactacttccaaaccctctaatccacccctgctcttgcagcctccctagggctgggttgctttggaggtaaccatttaataagatgtgactatcccagaggataacatggcgttaggctggcatcctttggtgctgtatgcttttttgaacatttttcttttttaaaggggaagagatggaaagcccactctactttgttgcctggttttatgccagctgcactgtacggaggtttcctggtgctatttatgaagatggagatgccttattttctctcctacttattcaattagctcctgtcaaagtgtggttaagagtaggagctctggtaagagggatctgggttcagacttcgatatcatttcttattaattctgtgggcaaagggctcacagttaccaagatgcacaactgtgttcccccttagagaagtcgctggtttgccatgatgaaacaagacaatccatgtctgtagtgcaggaacgaacattctccaaatgtcagagactcggacaccacgaaagtatactttccacctcacatatctcacctgtgcctattggctggggaccatcctcatcttggttgccttgcccaatggaagctccattctgatattgtttttgtggctgccaaagcagctaaagagcagttggaaaatcatgtaatgatttaggctttcaatgcttccgcccagaaatcatccattcatatgactcatgtgtattggccaaagaaaggttcatggtcaaggctcacttccagagtagcacaaggggatccaactaagacccagaaggaagggaacatctgtgaccagctctcacaagactgctgcagcatacaaagcacttagtgcagtgtttggcctgtattaaatgctcaatacacagtaactgtaggtatatgacttctcatgtgctgcctggctctagggctgagtcctctcactctgcccaaagagcttccagatttcaaatttgagatcagcctgtatgatgatcctggacgctaagtgagtggtcctttggtcggcaaggctggctcactgtcttgggcctgttatgctgtctgtttgcctggcttcccatccatcatctgggggcctgactcttcttggctagtggggcccttgcttgctctgtggctggccattctgaggctgacttttctggttctcactctctcagctggtcctgctagcagagacaaactctttgtcctctctccaacctctgcttctcttcccagcttgtgctggtggaattaagtcaagcaacatttcatttatcggcaggatgtctcagaaagcccatttaaatttgaaagagaaagcagaagacagatttggtaaatcataaaagcagaatccttaatgttctcacctgtagtgagccgtagtatcttgatttatttagtaagtgcctcacacttaaaaaaagattgtctcctctaagtgtgaatttgaacctacttaaacagagtttatgttaccagtgaatagtaaataaatgccaagtgcacacttgcctcctggaataaattgtttacatgaggagcaaaggataaatggattggagcacacttggtcacagcggtctaggctcatattatgtaatgccatttttgtcccacggagcagatccatgaaaatactgtaccccacagggtggatccgtaaagcgccagaagacagagttcaacctaagggaatgaatctttaaaatgttcccttaaaaatccaacaaacaaacaaagagtctggcaaatgcttaagaacattaacatttactgggatcatttcctgcggttttagataaacaacacagacaagctatagttggaggcaggattctctgccgcctccaactcatcagtcaagacatgaaagtgtagatgtctcatgagtgtcttccagtggatctcagggcatgtccatcactgtccttgtcaccactacagtcgacatatatctacccactaacggacttctctcactgcaggttgacattgcagtgtcttttgaagaatttttggtttctatgaactctcttgggtgtggcttgacttattttaacataatcatagggacatatcatatttaatatatttaatttgagaagctctggatgattgaatacaagttttctttttcatctcttcttccatataatagctacatgccaatttctggctagtttctctaaaagtttttacttctctctatagacttctctaactatctcaggtttaaacttaagtaacagtttttagttcttagttcttctccaaataaatctgatgagtcctttgaattctgggacatggcagtagttgtaataagttatgttctcttactgaattgactgatagatggcatagttagacagacgtggagtctgtggcacgatctcacaccagaaatgttgcttaaactgtatatattgaggacattaaaattacccaattgcttaagatccattcctgcacagactatgtgctaaaagtttagggtacaacgtaaatgttgaggtgcagttgaaaggtcaaactgtggctgttaagagatagcccttttaaccaaaaaagcatgtttaaattttactcagaaagaaaaagagcccagtttctaaaatcacaaatctagcccttatgaaagagttaagtgaagaatgaggcaaactttcccaggtagccttatctgcattggaaagtctgactgtgcctgccagttgaagtcggcccaagttgaactacctgcctgggcatcatgggactggatgtcatgaccgttgggtgataaatatatttctttatcctccagagtaggcaaagagccttgtgtttcactgacttgagctattactgtgctcctgccagtatgttgttaggtctgatccagcaataacatgaggagttaatttgagaggatgggactcattgacataaaaaaaaaataccaattggcaaactcatcagtcaccagatatttactgagtgtctttcatgtgaaagatactgtgttaggaagctgtgaggtctttaattcaacaagcacttatttgacatatactgtgttattaacaatgttattaaatacaaagaccagtgcagggtcccttccctgaagatgtttaaagttgtataaacagagttacaatataatggcagtgttatgattaaatagaaaaatgcaaactattaatagtgtaagaatactgccttcaagggacaggttgtttagatgataaagtatacttaaaaaaaataagcaatggatactgtcatacataatgataatgtatcataacaaaattcattttattccagtaatgcaaagttgatatgaaatttgaaaatcaattactatattttatcatattaataggataaaagagtaagaccatacaattatctcaacagaggaagaaaaaggatttgatgaaattgtgtacccatgcatgacaacattctcaactgacaagaaataaaagcaatcattactattccgataaaccatttctttaaaaagaatcacagttaatggcgaactattgaaaaattatctgtgcagattgtgagtgagacagagatgtccatggtcatcgcttttagttggcattgtacggaagtagtagacaatacaataaagcaagaaaaagaaatgaaaatataagaattgaaaatgtgtaacgacattatcactactagcagacagtatgattgtgtacatttgaaaatacaaaataaactacagatatacttaatgaattaatactgtcactggatttatcaggaccactggattcaaagccaataggcaaaatttagttattagaaattccagtctaacacttaaaaacattactatttacatgaacataaatatgtcaaatacttaggaataaatttaataaaagctggtaagacttctttttaattctcccctaaattgacctatagagtagatccatttccaattaaaatgtcaacaagtttgtgtgtgtgtgtattgaaaaatgattctaaaatttatatggcaatgcaaagggccaacaatagccaagacaatctttaaaaagaagaacaaagcctgcttccaggcatctaaacttattctaaagctagattaattaaagcagtgtggtattggtgcaaggataaacaaatggatcaactgacaaactagacagtgcagaaacagacctgtgcagatagatacttgatttatgacaaaagtgactctgtaatgcagtgggaaagagataatcttttcaaaaaagggtgctgggtcagttgcatatccacattaaaatacgtattcatttgtgttttaatatgaatcagtttaatatgagttgtaaacctaaattggaaagtgaaatgaggcttctagaacaaatgtaataaaaaaattcttcatcaacttgactaaggaaaaattttgaagcagttttaataatcccaatttattagattagtaaactggactatattagaagtaagtgcttttgtgtataaaatatttgattaatagcatgagagacaagtcacaaagtagaagaatatgtatatatatatatatatatatatatatataatttaactttagaagaatatatttttagcacacactctgacaaagagttttaatccaggatatgtaaagagcacctacaaatcaataagaaaaatgtagacagcccaacagaaaagtgaggaagacacttgaacaggaacttcacaaaagaggataatcaaatgggcagtaaatgcatgaaaaggtgcttgatgtcattagttatcaaggaagtacaaaattcaaacaaaattatacaccattattcaaacacaagaatggctgaaattaaaataaaataattgacagtgaccaaagtattgatgaaaatggggagcatctgtagctctcataacttctggtaggacttcattcatagctgctttggaaaactgtttttgcagtatctactacattaaacacatcttttgatattttgacctataaaatttaaattctatgtatatatcaaataaatgtgtgctcaggttaatgaaagacatatacacaaatgcttaccgaagcattattttagttgttcacagtaggatgcatccctaatatccaactatagttgaatggacaatgtattgtagtctatccatacagtgtaatacattgagcattgaaaagagattttatatatatctattgcatctgcatgcaataatgtgaatgactctttcaggcataataatgaacgaaagaagacagacatagacagtatgattccatttatgtcaagaaacaggcaaagctggccaggcgtggtggcacacgcctgtaatcccagcactttgggaggccgaggtaggtggatcacctgaggtcagcagtttgagaccagcctgaccaacatggtgaaacctcatctctactaaatacaaaaaaattagctgagtgtggtggcacatgcctgtaatccgagctagttgggaggctgagacaggagaattgcttgtatctgggaggtggaggttgcagtgagccaagattgtgccattgcactccagcctgggcaacagtagtgatacacacactctctctctctcacacacacacacacacacacgcacacacaaaggcaaagctgaagcatggaactaggactcagaattagcgattacttctgagggtaaaatgggcacgaaggaggcttctggggagctaatactgttctatctctatttttaggtgttggttacgaagtaaacatttacagagctatacacagaagatttgcatctttatgtagatttccatgatagtttacaaaaaataaataaaatgcgtacagtgcccttagccttgcttactgcttctctccagctatacctcctcagactctatgcttctcctgtcctctctaacccatggaggtctttgtccttgatgttctctgtcactgttgtcttcatgtgggtgactgctgcttgtcacctctccctgtatggcttcctgggtccttccctctcctcacctccccatctgctttagacaaccttccctgttatcccattgcacataagacactgtatctagttagagctttatttgcctttcccactaaactactcactctttaataaattctcttttttagtagaacatctatattttattcaacaggagggaagataaaacattcttttttttttctttttgacttttttcaacttttattttaggtcttgggcgggtacatgtgaaggtttgttacatgggtaaacacatgtcacggggatttgttgtatcatatttcatcaccaggtcttaagcccagtacccagtagttatctttttctggagttccttccaggagcaattgtttagtgaattgtgaccttcttgcttcagagaccttaaatcatgccttgtccagagaaggatatcaaggaaggcctcactcttggtgatggttcgtactggtaaggacctggaggaagagctgccagttgtaggactggtctgaattaagacttttgagcagaatctggacagccaaaaactgtttgggagagcagtgacttaacaagtatatctggggacagagtttatttaggaagaattgggtgtaaaaacacccacaatggtagattaatgggcttgaggacttggaagatactgggctttattctgtaagcaaaggggagatatttgaatagatactttatttgaaaagcccaggtttcagaaaatgtggtggcatgcagtgttgaggaatgagagcctagaattggggagaccagtgtagcatcttttttagtggtccatataggaattgtgaaaagggaagtaaaaagaggtgatggaagtagaaaactaatgaggcaccgatgcaagaagtattgtaaaataagagctcatgggacttcctgttgaattggatctggtgagtctgagcaagctcattcattcaggaaacgtttattgagtgccacggatgtgccagaagttgtgattggcatgatggacacaagaatgaacagggaaaattccaaagactacttgagagttggaattctgctctttgtatcttggacccacaccattgttatggtcttgattcatattatccatctttgtgtgattataattaacaaacattccaatacctactgcctacagggagttgagcttcagacttcggaagattcagcatatatgagtgggcctttggcctcgggttacttatgatctggttgtctttcaagactcaatttacatgtcatcatttctaaacctaaaacctggttgggtgtccctcctctgtggtcccataacaccatggacagcatattataacccttaacaatactgttttgttttaattggctgtctatcttctgccctcaatggaaagtttttgagggcagcaatggtgtcttataagaaggtactgttaatgccaagcacagtgcctggtagatgcctaatattgataaacttgactattgaaacagcaagtgaacgaatgaatgaatgtgtgttgagtgagacagggcttagacccttgagtgaaagaataagacggcatatgctacctgccagatgaatgctacagatgtcatatgcgacaaaaattcactggaggctgagtgcaggtgactcaggcctgtaatcccagcactttgggaggctggactgggaggatcgcttgagattaggagtttgagaccaggctggaaaacatagtgagatcctgtctctacaaaaaattaaaaaattagccaggcgtggtagcacgtgtctatatgcctgtagtcccagctactcaggaggctaaggtgggaggattacttgaactcaggaggacgagactgcaattagccatgattgtgccaccacactccagcctgggcaacagagtgagaccctgtctccaaaaaaaacaaagaaaaaaaagaattcagtggaaagaaacctcaggtttgcatgagaaactactgattaggcattcacacagttgtaattgtcagatggagaaggtaatatacaaggctgcatctgaaccatcccacaggttgagatttcattgattttctcctgagacttgggaaatggagtcactttagtgatctatgtcaatatccagtgttattgtttatggtagactgttttgggagtttcaacttccatatgtctccattttcattagtctggaggagaacattaactttttaaatttttcctgagtacattgttctagcttgttgccttgcctgaatctgctagctcattatttagctcctgccctgctgtggctgagtgcacttgatcagagacggtaagacactctgcagcagggaatgtgtcaaacccaccaaaatactatttttttttttttttttgagatggagtctctgtcacccgggctggagtgcagtggcacgatcttggctcactgcaagctctgcctctcaggttcatgccattctcctgcctcagcctccccagtagctgggactagaggcacccgccaccatgcctggctaatttttttttttttttgtatttttagtagagacgaggtttcaccgtgttagccaggatggtctcgatctcctgacctcgtgatctgccctccttggcctcccaaagtgctgggattacaggcgtgaaccaccgcacccaaccaaacccaccaaaatactcttaaaggccggccagccttgattattaagaatcttctactctgactttctgactcaactgattcctaagttttccattccctgaaatcctatcacttcaacccacgatatgtccgtgacatgtgcacacattgctaagagtctgcctatgagattcccaatgtatctttctattaaaaaaactttaatttggaatacctttagatctacaggaaatttgcaaacatagtacaagcatctcctatacacctttttcctgattttcatttcccctaatgtgttaacacctcaactccacactttatttgaatttcactagtttttaaattaatgtcccttttctgttccagggtctcatccaagataccacattgcatttagttgccgtgtgtccctggtcacctcttgtccatgacagtttctcaagctttccttatttttcaccaccttgacggtttaaaggcatacagatcaggtcttttatagaatgtccctcattttgtgcatgtctgattttttttttttcatcattagactgggattatgggctttaggatggagtaccacagaggtcaagtgcacttcttgtcacatcatatcatggcatacatgctatttacatgacatgatcgatgatgctcatctttattgtttggtgaaagtagtgttcgccgtgtttctcattataaagttactatttttccctctctacactctaattttttgaagctagacatgaagtcccacatccccacattcagcaactcctgggctagggagtgattgcatttattctttgtaattttttgtaaggaagattagtctattttccctcaatatcttatttattcaaacctttatttatatccgtagacccctgggatatttatcttatgttgtgggtaaaatccagttcgatggtacttttatgattctttaagttgttcctgctttggtcatgagaagctcctttaggtgagcccctgtgtcgcttggacatgtccacatccttttatttgggggaacttccttatgctgtggtactacagaatagtccaggtttacctcatgttctgccccttcctaacatcttaaagatattttctcataagtatattacaaatgatattacattttcagcccccacagggtccactcttaaaaggctccaataacagaaatacatagtcatttaatatatctggtaaaatctcaatacagatgtttttgtaaagatgaaacatcttcatttgaactttttttttttttgagacagagtctcgctctgtcacccaggctggagtgcagtggcgcgatctcggctcactgcaaactctgcctcccggggtcatgccattctcctgcctcggcctcctgagtagctgggactacaggcgcctgccaccccgcccagctattttcttgtatttttagtagagacggggtttcaccgtgttatccagaatggtctcgatctcctgacctcatgatccacccgcctcggcctcccaaagtgctgggattacaggcgtgagccaccgcaccgggcccatttgaactttttataaaactcttgaaatatccttaattataaccctggcctgtaaactctcattcagatgatggagagacgtcttctactaagcaaatgacagagcaagctaagtggtacagtgactttatgtagtatcctaatatagtgtgtgtgtatgtgtgtgcatgcatgtgtgtacagacactttctttgtacatacagatattgttattcttttctttccagcatgagtggtctgttgttggagaatcatgttctgcacttggcagtcataattccattcgtattccgtggttccccatttggcattattttccgacctttttttgtgtgtgtgtgtgtatgtgcttagaatatttggcctgcgtgcgggaaaggggtcttctatagtcagccatcatgagccaagacactattatctgagattcaaatctctttcaaaaactgacttggaactttccaacaccagcccattcattcatactaataaaacatctccaatgagaacgaagaaaagatggataagaagagaaggaagtatggtgggataggcattgaaatgcttcaaaaatccagtgctccaaggctgatgctaactttgggtggggcgtttcaggagtgtgaaagtgtgaagaatgtacatttatctctggagtccctagctctcatttcaagatgctttttctccacactgatcagcctgctcgtggtgctgctcccaataagccgccgagtaattcctgtcttctcatcctcctgacttcctggtcacaccaagagtgttggcgtattggtggcttattcataagtgtatcctataagccaaaaaatgaaattaattatcatcatcgttgtggcttttcttcactctagggaatgttacaaaatgaggtaataagaagacaacaatccccagagctttgttgaaggtggtttatgaaaaggagagctttactatctctctgcccattttctttaacaaaaaacaagatgaattagaaggcctcatgtcctctaagtgtaaaggaggaagaaagaaaggcaggggccgcatggaacagatggaatatccccgctgataactagcatttatattgacaaaacatcaataatgagcagtgtacaaggaggagttcaaaggaggcaggcatttaccctctatggcatttatttatttattaaaatggagtcttgctctgtcacccagactggagtgcagtggtgcaatctcagctcactgaaacctccacctcctgggttcaagcaattctcctgcctcagcctcccgagtagctgggactacaggtgcatgccatcacgcccggctaatttcttttgtattttagtagagatggggtttcaccttgttgcccaggctggtctcaaactctcgagctcaggcaatctgtctgcctcagcctcccaaagtgctaggattacagaagtgagccaccactcccagcctatttatttattttgagacggagtcttgctctgtcacccaggctggagtgcagtgacatgatcttggctgactgcaaactccacctcctgggttcaagtgattctcctgcctcagccccctgagtagctaagattacaggcatgcaccaccatgcctggctaatttttgtgtttttagtagagatggggttttcccacgttggccaggctgactttgagctcctgatctcaagtgatccacctgccttggcctcccaaagttctgggattacaggtgtaagccactatgcctggccctctatggcttttagatagttgtcttattattttattaggctactttttttttctatttggatatctcactttacttgacttttgtattgggtttagaataaccgtcacaggattggtatcgagatgaaggaaagaagttgatatgtccaggcaaaatgtgagcgttgaggaaaacatattcaggcaaaaagatttgcagacagagatgagctactgggaatggtgaatgtactgaccttagtgtactcttttatttctttcctgtttttaagaatgggaggatgtgcttgtcggaagtacagagcgtggtgaagagctcctcaatatggcaaccctgaaagagtctttgggcttctgattaggagttggaaatgatatagttggtcatttccatctggtcacctaacaaaatttttttttttttgagacggagtttcacccttgttgcccaggctggagtgcaatggcacgatctcagctcactgcagcctctacctcccgagttcaagcgattctcctgcctcagcctctcaagtagctgggattacaggtgcccaccaccatgcccagctaattttttttttttttgtatttttagtggagacagggtttcaccatgttggccaggctggtcttgaactcctgacctcaggtgatccgcccaccttggcctcccaaagtgctgggattacaggcatgagccactgtgcccagccaaacacacatttctttagcttagaaacctgctactggtgaaaagctatttgaatagaattgctggtcggcattggaaaaaaaaaaacagattaaaaaagtctttactgagaaaacgacttaaaaggcaaacttaatatcatccgtggagagagaataataagtcctacaaccatttattaaatgtaattaccactaaagtaagtaggccagtatctagcctcgcacctattctgaatctcaggcttgcttatttccacactaaaacacagcaagataaatgggctttaagataaattgttgagctgttatttgggctatttatctaggaaaacatttccttcccgatatgaacagagtagatttctagttgcatttggaactgtgttgttttagccaatggacctgttcgaagaagaaataaacttaatacaatctttgccagctgtaatttcaagattagctgtccagtttgagtaggatatttggtcgattgatttatccattcattaacatttaattctatagctcagggcagtcaccaataaggtatagttaaccacatggataatttaacattttattcactgtcactattgctatagtaaaaggaccatcattataacaaggaaggtcctttccagtgcagcaccttcctaagaagaattgggggtttcagcaaagctctattgaaatgtagaggcttgaatgacctcctggcctcagtcacttctgcacaacatccatggttcagatttgtgtctcaaaagtttatgaagtaccatatgagattgaatttcagggttgctggtaaaaaatttagaccaaatacattaaatccccaaatgccaaaggcctgctgtttttacagcttttcttaatcagaaacatttttttcatgtgtgtgttttaaaatttgtggtgatcagggatcaaaagaatttctaggcattagttttgctaaagattactcttctaagtagcttacctgactggataaagtccagagatagacccttatataactgggaaatggtactcttgccaaggataccacttcctgccgcctgggccacctctcacccttggcatgacacgtgctgctactgaggacggtggtggtggctcccgctgtgatcaccgttagtaccgcgttgctgtcctattgctctcatagtcacttgcagatgctgaatctgggactggtgcagaggctggcattgcctgagctcccgcacatccgcttggaagctgaaccatgccagtgcactacgccactttactggactgggaagaatcttttcccgtccagtatttcgctccacactgacctcttggtttcaaagtagctctgcttatgtttccagcgacttgaggtttttctgtggagatgagctttactgttcctgggccccttttcttttcctagggcctattcctttatggaggcaaagctttatggtggaattgagagagaagaaatgtgtctttctcactgttgcccctctctaccagtgcctgggttacatcctgatttcctattcttccatttagaatgcatgaatgcattttttttcctaggaagctcattattcctcacgctgcagtccttaacccttctctagtatgtatagtttcaacagagtcggcctgggctcaatcctgagctgctcatatctctgtctgggaagttcatcttcttccttgaactaaatagcaaacgtggatgccttagtaaagtgagagtatcacagcccaattgtccttacacccaggcgcctccaactagagaacagataatatgtaacttaagtttaatttcctagatatagatcactaagatgtatataccttccctcttattttcaattggttcatcatccatgcagcaaggagtaaccatcattactaacttgccaaaggaagcgttgaacctctcgaggttcccccagtgttaaaattctctatgtagatgcctgtcacttactggttgtttggcaaatgggtctaacatgtatcagaactcttagtacttttatatgactggtaacaccatttctcataagtttttaagacaaaaatgggagcttttatacagtctgcagcaagtgctatatatttgtttttcacttactggtttttattcaagtctctttaatacttttcattttcaactcctacacttgtgcttgcactgcttttattacaccataattctgcttagaggtgcaggtggcagtgggtgaaggaggtaatgattccccagcaggctggttggtctgtggatgtggacatgattgcagtataactgcagtgagaatacccatgcccctcacctctgagctcctcgggcaacttgaggtctgccgttgtctttcatcctgaggaccaatgatgctatttttaacgcacagctcagagggtaggtctccctttctctggtccatcacatggaaccttaaactcccatgagatgacgttgcagaaccttgccatgatgtctgtggaatacaataaaatcataatcacatgaagaaaatgtgcccatcacagcctccctgagaaatgcatccttattttcttcatctgttcatcagttgatggacacttaggttgattccagaacttggctattgtgaataatgctgcaataaacatgggggtacactccataaatatgtacaattacaatttgtcaatatttaataagaaaagggaaactcatccttgttcagaaatctactcttggggtctaattaaaccttcctgttacaaataaacccatttcctcattgctgtgtcctctttaaaacagaataaaaagtggtgattcacttgacagttttttagggggaacagcttcaaaccaccagtataatttcatattattgttaatgttccaaattttatttttaaaaaattttttgagacagtgtctcactttgtcactgaggctggagtggagtggcatggtcactgctcagtgcagcctccacgtcctgggctcaagtgatcctcccacctcagcctcctgagtagctaggactacaggcacatgccatgatgcctggctaatttatgctaatctttttagagatggagtatcattgtgttgtccaggctggtctcaaattcctgggctcaagcaatcctcctgccctggcctcccaaagtactggaattgcaggtgtgagccactgcactcagcccccagttttaaatcatataaattactcagcatttcagcagagttatgatgtgcaagaaaattttggaaattcagaataataagaaaaattagtttttttaaaaaaaaatatttgggaaaatcatgtttcaccgaggcagaaaacaccttttccctaaatattcaaaatggattttttagagaaacaagttgctgaagtggagacaaataaaatatatgctacaaagtaaatgtaagctataagtttcttctgggggagactttagaatttatttttagatatcacagttaaaaaatgctttcatggatggaggcagtaattgcaaaagaacagcttgctgataattgccctgtgattaaagattcaatttgtttagtatgaaaatgaattgagtaaccttcttggctttattcaaggatgatgactcctaagtgggccctatggattgcagagccctagaggttgaaatctcatgcatgttgtagtctaatggggccttgaatgatagtagttgatgctcatattagtctattttttacttaagaaagccccaggactgaatcatttgaagacacatcagctagctgcttttgacaaaactctaaggaccagaatgatgaaaacaacacattttgggttcctttgaactttttgtttcagtcagttggaccttcctcccctcccttcattggtgcatcgaacttcgtttattctatatcccaaagagctaaaatagataaaattatttctggtaggtacatttttttttatgagagaagaaatgacaggcatgtgttttgtaatataacaacaaaacaaaatacaaactagaagacacccatatttggttagtctgtgtcacttgtgataagttcagcattaactaagagaatacccaaggcagaatgtcttaaatagtaaagcaatcttttatcccacataaaaaatgtgaagagttgttaattcagcagcttaacagcatcgtcagggttcttcccacctttctgctccgcatcagcaggctctagagtctgtttcaggtgttaaaatgccatcaacggctcccgacatcatatcctcatttaaaaaaaaaattcaaaggccaaaagagagcacttgaccttatgtccctttttaagagcagtgaaatgcttcttaaggcctctttcccattgcactcaccatcattggccaaagagttccatacggctattcctaaaccagttgctggcaagggaaacggaagacttcccattgtgaggtggagggcatctggacttccttgaagcacaggtctgcttataacttatcaaaattggaagccctgtgcttcaaggaagtggaggggtgttgttagatcatttttgcattgctataaagaaataaatgagatttggtcatttacaaagaaaagagttttaattggctcatggttctgcaagctgtacaaacatggcactggcatctgctcggcttctgaggaggcctcagggagcttttactcatggtggaaggcaaagcagaagcaggacgacgcctggcaggagcagcagctagagtgaatgggaggggccacatccttttaaacaaccagatctcgcgtgatctcactcatcaccagtgggatggcactgagccattcatgaaggatctgtgcccgtgatcctgacacctcccaccaggccccacctccaacactggggtgacatttctatgagatttagtcaggacacagatccaaaccatattagatatggagtggttattgggtgggaaatcagacctccgcaggactctgttttgtttttgtttttgagacggagtcttgctctgttgccaggctggagtgtagtggcatgatcttggctcactgcaacctctgcctcctgggtttaagtgattctcctgcctcagcctcccaagtatatgggatcacaggtgtgtgccaccacgccaggctaatttttgtatttttagtagagacagggttttgtcatgttggccaggctggtctcaaactcctgacctcaggtgatccgcccacctcagcctcccaaagtgctgggattacaggcgtgagccactgcacccggccccacaggactctgttttacaacttctttctatcttctccatcttaaatttatttgcagaagtcaggagatacgcacacacacacacacgcacatacacacacacacgcacatacacacatacatgcccatgcacttgcgtaagcacccataaacatgtaaatattatgtaattgattagttgtaatttccctgagacttttgttaaatgatttgaaaaaatgcaagaaaaggtatcttttatttaacagtgttgcatgttttgttatactgtaattatgtgaaaattagcactcttggtaactgttaatcagaatagataggtgattatataattctctcctgttactattctgaataaacaagagtctactaaaaacaagtgttacatgaattcctttaaagggcagtatgcgtgcttggctactaattagatatgggaagtgatcaagaggactaaggctggatcactcagtttcctcttgggtaagctcctagacggtggccatcgacattgtaaatctaggggcaagcacagagtttgaggggcacggtgatgacttatgttttaaatatgttaagtttgaggttcttgagagacattgcagtggagaggtctaacaagagttagatgtgtgtctgaaattcaggaggacagctgggttgggttgcagacatagacttgggaatccttagtatgtaggtggtcgctgcagtcctaagagtagataagattaacaagaaactgtgtcttagcatctccagctattctcaggtttctgttctgtccctctccttgaatgatattttcatacaagtcaatatatgttattaagtcaagtcatttgttcagccaattaacagatattaacttatatgaaaatatacacagacagaatataccccaagttaatatatcatcaaaaaataaatgttattatttatatttaaggtacagcatgatgtagtgtatatatatatatatatataatggaatattaatatatcttaattttagattgaacaaataagaattaggaaagtatgtcttttaaatctatttttttccagccatagaatgcattgtaaagcttacaaaacattctctttggatttttccatgctttattcctgagtcttttatgtctatgaattccaatgagaggtgcttggttccaaaacaaatgtaaataggtttagttttcattccgtttctttatgagcattgatcattgagaatttacagtgctcatgtcaatgaaacaggcagatgcctgccccaaagtggacagaactacaaatctggcaaagctaaggaaggaggagggtgaaggtcatacgagagttagtggattaataatatgaatgattatgatttattatatttctgtaattttcattattacagaggagaagtgtgtcctgtactcagacatgctccagtccagctgcttcgctttctgctcagatttgttggtctgggatttcttaaagcactggtgatgagagagaatttaggaggtacagacatgctatggcataattttggattctttaatgaggaagggattcctgcttcagttctctagtaatcctgcctatttaatgaatgggaaagctcagttcagtgctagtgagtctttaacaactgtctactgtctaccattaacttcagagagacagacagacagagagagaggtgggtgacatacctactcatactaatgttccatgtagaggactgacacaaaatttattttcctttttatgaaaaggtacttaagttaaaaaaaatgagttgacttaaagaaaaacgttaaatgatactactctaggtggtatgtggatatggcttctagttgctgtccctaacctttcatcttccctctatgtcacctgtgaagccccgacatttagttattcctaagcatagcttccttgatcaacattctacagtggtcctctcctgaatggagtcttgctagcagaccatcctttcttttcatagtccaccttattacggactacatcctgtctccctcaattttggatgttttaggctcctgggctctgtacctttgctccttcttctcttcttcccttccccaacctgctcacggcaggagtttgattccaagtcccacccacacatcaaagccctgctgtagtgccttagttaccgactgcaactgtaccaaccgtcacatctttcttgcttttatgaatttctgttgcatctttgatcagttatcacagttcggcacttaattgcactcccattgtttcaggtacttgtctgtatcttagcaaattattttccgtatcctagcaaatgtcttgctagcagggatggtcatttattcttgtctacggatactgtgcatagaacagtgttggacagttgattatcagaaatacatgtttaagcggtttaaccaaataaactgtgttttctaaataaactgtaataaccaaatgtgtaaccaaataaactgtattttccaaaagctggtatgcacctagaagtgtcccaagatgcatgagtttgtttttttagcacagtggtttttaaacatggccacagattcttgatccccatcccttgaaactggctggccctatgactgctttgaccaatgtactatgacaaaagctacactatgtgacatccaaggcttgatcataaaagactgtgcggcatctgaaccattattcttggagttctgagccacactataagtatgacgaccctgtgtccgccaggctgcaaggaagtccaagctatattgagaggccccaggtaagcactgtggtcagccatcccagttgagcccccgtttggtcattccagccaaggttctggacatgtgagtgaaaaggcctgtagatgattcctgtagttagctattccagtcactcccagcaacttaagtcttcccaagtggaggaaatagacatgtttaagcaaatataagccatccctcctgggccctgccaaattcctgcctgcacaatccatgagcacaacaaaatagtttgctttatgccaccaagttttggggtggtttgttcgacagctatgggtaactggaacacttccttaaaaagagatcataagccttcgtagttcatcccctgtgtagcccatcttattgccaattacacttacactaaaacaaacaaaaagtgaaaaaacaagacaaaatgcgaagtaagaaagggagatcttaaaagaaaaaggggagtaaagtggcagaaagcaaaggccacggacataatcatatcaatagagatgtagatacagatatatgatagatagaggtagataaatatgaagatatagatagagaaaggctaagatacattattagcataactattattggtagatttcacttccaaattctttataacagtaaatctacttagctaaattcttggctgcaattattattctttctgccaatttttatttctccatggaacctacttgccacatataaagcctgagaaaagaagtaactatgtccaaacttttcccttaatcatcttctctaagatattaatgagcaatgaaaatgtgaaagtggcttattttattaactgtcaaatagatgaaaattaaaggaatagtaaaacttcttttatcattttaaaaataatactgtcaaatactggtgaggatgcaaagaaacgaatccttcctcttttggggagagtaaattgtaaaaacgtttttgtccactaatttggtagcatacatcaaaacattaacatggttaatatgaacacaattaatattaacactattaatacccttcaacccagaagtattttctgtaatgaatttgttttaagaaagtggttatatatgcataaaaattttctttgagaatgttcattccaacatctattctttaacttatttattagacaaatatttactaacatctcttcaaggctaggtggagttccttgccttggaggtgaataggcactaaactgatccacatgtggcagactttaaaatgataagttcaacgaagaaaaatgaagcagtgaacaattgtggggagtgggagccattttagttaggaacattagggaaagcctctgtaagagggtgacattacagcagtgttagttttaatagaaaacataaattttcaaacatagggactgttgaataaattctggcacatccaggcaagggaataaacatagcagttgaaatagtaacaacataacaatgtttttctcataaatttcaattaagaaaaggagtttaaaaaaagatgtttaatgtattttgtacattttctataacctgtatgtttataatagaggactacatctcacagggagagaatgagaagaaggagatactccaaaatattaatactggttggtgctgagtaatgggatgaggaataatttttattttctacttttgcttatctatattttctaaaaagttctacaatcagcatgcaaggtctcataaaaataaattgaagaggccgggtgcggtggctcacgcctgtaatcccagcacttcgggaggccaaggtgggcggatcacgaggtcaggagttcgaggctagcctgatcaacatggtgaaaccctgtctctactaaaaatataaaaattagcctggcatggtggcacacacctgtaatcccagctactcagaaggctgaggcaggacaattgcttaaacccgggaggtggaggttgcagtgagctgagatcgcatcattgcactccagcctgggtgacagagcgagactccatctcaaaaaaaattaaataaataaataaaataaattgaagaaataaaaagaaaacctgattctttcaaactaccttccctctgctcctgctttattcgtttgccatctatggcaaagccccatgagggcagccaccctgttgacttacttccttccttccgcagtgcttggcatagtgcctgactcataatatgtgaggacattataaatgattcttgaatgaagagacacataaagacccgatagaaagcagagctgtatttgtcgagcagtttttatgttccaggtataacactaggttcttcaaatatgttatctcatttaatttctgcagcaacagtgtgagggaaggatgaagctctctttttcatgcttagaaaacagaggtttagcgaagttaaacagccatatgtggagacctggtattcaaacccaggcctgttccaatgtatggctcagtccacattttattgcctctggagtctttctgtccccacctgcctccatacacacacacaaaggatgtggcccatacatatagaaaatttagaggaagagaaagatctttttgggcaggtgcattgcatctgagaggtcattttttcctttattaacataaatataagtaagaaagaatgatgtctgattggactatagtaaaataataagacatcattaatagtttttaaaaatatggcaacaacatttggtaaggttatctggtgtcattgaaagaactctgaatgttgtggtattagtaggtctgggttttagtcccagctcaggctcctaatctgtgacatctttatgcagtagatgtagttttggctgcatgtaacagagctcccaaagcagtggcttatgaagatagaacttcgtatctcccttacatgaaagttaagacgtaggcagctcctggatttgtatgaggtctccggtctcctgggaccccttccaactgtctgcttgggcttctggagtgtgtgtttctcttccacagagtccagcccactttctcagccagaggatggaggaagggcaagaaggaacatctgccctcccctttagaacacatcctagaagttgcactatcacattcctgtccatcctgctggctaaaacttagtcacatactgcagctagctgcaagggaggctgacacatataatcctgcttctggaaagccaagggatgagctaacattcaggggtgttttgtgagggcagatattaggggacacttagaaatctatgccacaatcctttaaggactgttctagagttctgagcttctttagatatccctaaagacaccaattgtatacatattctgatgtgtgtgttgtgtatatgaaaaaaaatgaaagagaattataaatgacaatattggtaacttttaaactgtggtttcacttagtcctctgatagaaacaatctcgcaaagtctaatgaagtgcaaagaaagtgaatctatccagaaatgctttttaaaaaactgccagtgggaacataatcaagtgatgtttgataaggctgtggtagaagctattaaatcattaccttatatgacattaaatagcaaaaacctccattttataaaattattgaaagggatgtcaatctgtgcctactgaagttgaaactgactttttcaagagtaattgtgtggagtattattttcttcaaagttgccttccatcttaggagagcaaaaattcaagcaagacaggttttttttccctttcttcttggctttatctcccttacacagtttaaaagagaattaagcttattttagttctctgatttttttcccccattgcaaacattttctggttggaacgtaatccagtgttctcagatattattttggtctaggaatgtccctggttgtacaacagaggcactaaagaacaaatacactttccttgccaatgataattgctaaagcaaaagggaacatttgaatttaagttctggtaataatttcttatttacattacaccaatttgatgccaaaagtaatgggggtgttatggttatataattaaacatgaaacacgacaacatgtggaaggttaggacctcttgttattatttcatctgctttttataataacatatgatgtttccctagggggtctgatgatagatgatggtagtctctaatatttgaatgaagaatgcaaacattgttactttaaatcagtgttctctgtgccacaagcagcctaactctagatgaggtggtattgatttttaaccagtgattgttagagattagaaatcaaactaatcacattctgttccctagatctcttctctccttgttaacattctatttttttccatttttattcttcacccacttatttgttcaccaattttccttgaacactaatatgtctgtaagaaaattatggtaaagacgttctaaaatagaaataacatctcagtaacattgaacatattatttccttgctaattttagaagggttgctacgtctttgcttgtgtttctccctgggatactgcttacagctcgtgtcttcactgctttttcattcatgaacttgtttggaatccaattcttctaaaacttttcttattctctgtttggaaaacaaacaaacaaacaaaaatcaatggacctcctgctggaagaagtggtgtccgtctagctaagtccttcccatggggcccttgggtgctggaaactggtgaacaagcattttttgagcatccacatggttcccagctgggcactggttgggggagattggagaggactttgtcaattagacaatgaaggcatttggtttgtgcttctgaaggcaagaagcaaaatctagtttatgtcatcttctgctaagtatgggtttcagttgaggcagaactgtctgcttgacttggttaagtggtgtgcttgtgagaatagtcattttatacctaagatagagtaatagcactatttcctgctgcttctcaggaatgtggtcacttagataaccatacaggctcccactttcaagggaggacttagggaccaactgcaggacattagtaagggacagaaaactgacacaggacaaaacagcaaaaaaaaaaaaacagaaaagaaaaaaaaattgggggttgtgtcagccaattttcaaatagcccactaaagttttgcagaatgaaaaatatagaccatgagttatatcaagattattatggaagagccctcataaagaaaggattggtgataatagggtgaagttctttttcagttattgagactctctggatgaaagagtcagatgtgagtttgggacagtttgtggtcattttggaacataaaataaaccttggctggggtttgaggtagtatccagcaagcaaccgcaaacaccagccggttctgctctgtaaagcctggtgcagaggtagatatgttggctagaggcggggagatgtgtgctccaggaggtacacagtgagagtcagtgatccaggccgtagggacagacttagagcaggaagaggggatgggatggcagaagtgatgggaaaaccatgtctgcagaaactgggataaaccatcagcttaaagcctttatccaaaagcagagggaggctgctgcagacctgcatgtggcaggcagttcacgtagctctgtggagcatttaaatgggggctgccacatgcctaagtgtgcctggtgtacagaacaggcgttctatagggcctgcggtaggacagcatcttgcatagcctgggaaaaggggatgtgagtgccatttggcccgagttagaattaggaaggaagaaaagtcaggaaggacaccaaaacttagaatcgagagaggagaggggaggagaggggaggagaggggaggagaggggaggagaggggaagggagggcaggggaggggagtggagggaagggaaacatgaagcataccaatgcaaaggcaaataaatgcaattattagagatggtgaaagataaaaaggaagttttctgagctacctgagctcactctcaagagcgatattttaggttagaactcattgcttaattccttttcgacagagcttagctatgagaagggatttttgcagtcaggaatactaaaaagaaagcggttgtgcatattatttccagtccttcatgttatgggttcctctctgctggagcactgcttgtgggactgaccccatggagccttcccggcaccaggggatgctgaacatggatggtctgtaactatcctctgctggaggccccagagggcatgtgtgtgggtgagagtagtgagctctgagtcccacagggcccatcctggcagctccctggggctgctttctagacaagcccgtcctctctccagctatcctcggtggccatgtggcagcctccagctttggaggtggcggcgagggcagggggctggcgaaactgactgcttgtccctggcttctaccagtcctccctgccaaaggtgtctcatttgttctggccctcctcttctgcaacatgaaaatttccctctgaccctttggatggacgctgtccagaagcataacccggtgctcgcctctctcctcctgttctgacccctgcatgtcgaggcttcagcatgaaggcttcagacattcgctgcgtggcctcccagcttgtgggccaaccccttcatcttgtggggtttcccagttttttctttttaatagtcaagtccacaggttgccctttcctctcattttgggaagactgtggtgtgtgaccaaggtccctatgtgtatgacaggaagggtaattggcaagtaagacattctgaatagaatatatgaaaattgccaacttttatggttttgcgagatatcctaaactattatagtaagaattaaaatatttcttttctagtgagccttagcagaaatggatataggtcaggttggtttcttgcttttttcttttgcagtgtattcaaaacatagtgttatggactgaatgtttgtggttccccctcccaaattcatatattgaaatcctacctcccatgtgatggttttaggaagtagagcctttgggaggtgattaggtcatgagggtggcactctcatgaataggattaatgcacttataagaagaaacataagaggggtgattttctctctcagctgcatgagaatacacggagacaacagatgtctgcaaaccaggatgtgtgtcttcctcaggcactggatctattggtgccttgttcttggacttcccagcctccagaactgtgagacataaatatattttgcttaagccacttagtctagggtagtctgttatcgcagcctggactaagacacgtagtaaaccatgtaggttgctttgcaaatttttcagatacatggcattgttatagtttgcaataccatagtaacagtatatgatgttgtattctatctcttttcttttttttttttttgagacggagttttgctcttgttatccatactggagtgcaatggtgtgatctcggcttactgaaacctctgcctcccgggctcaagcgattgtcctgcctcaatctcctgagtagctgggattacaggcacccaccaccatgcccagctaatttttagtatttgttttttttttagtagagacagggtttcactatgttggccaggcaggtctcgaactcctgacctcaggtgatccacgtgcctcgacctcccaaggtgctgggattacaggtgtgagccacgtgcctggccaccgtgtacactatttttatctgttctttcacactggtggctggggaggagaggtgaacagcagaggagcataggagcattcatagaactcttggctgtgttcattgacagtagacaccctcataagagactgtttgctatactaaaaattagtagactatgaggaaaataagaaataaatagatgtgttgcacttgatatgtcattcatacagataaaaaagattgtgaccagccaaagagatggattgtgaatttcaagcctgtgataaatgtctagcattcttgagctccaaggtctataaaattttgataattgcagcattataagaatggaggtgaagaaggaagggataaatgagccaaatgttaagaatatgtgtggaaagttactccaacagtttcatggagacaaaatcctattaatatcaagggaagtattagagcatctaaggatggcctgaagtaaattatcaaaatggagaacacagtgccacagaatgaggacatagaaaatctgaagactgagtttcaggagaaagaatgaggcaacataaaactgacaaatgagactagagaaggttgagagcacaagaaaacaatgggatatctggaaaattttctttgtggagcagaacccaattcatgatatgatttaaatatttaaagtatttagatataatatacgtgtttactattttttgtttttctactgtcttatggaattgaattttgagttcagtgtagctggactatatccactgtgtttgccttgtaaagggttgacagtggtgttttctaaggcatctatgtaattgtgtgtttatgtgtgtgtgtgcgcacatgcacacgtttcttcatgtatctattatacatatctctgtatctaaatgtctatctatatataagtaatatggaaaagaggaagttttttcaatgttctcttctagaattatgatcaacaactcaggaaaatactcaacttgaaagagattagtgaatgtggactcgaaaggtctaagacagagaaagaagttgctgtaggtaagtatactgaactcagaatatgaaaatgaacgaatattaaagctggagaagatgccaagaaattctaagaatacaagattagcagtgggaattagaaatataatttagatcagttgagcctgaagaataacttagtgaagatcaagggaataaaatgtgtctgaaaggaggagactgtcatgtcccaaaggtatatgtggggggaaacatcaaagcctggtgtgcaagaagctcctgctaagccttgttattcaaaatgtgctttacaaagaggaagcaggaaggagcatcaccacggattttattaggaatgcaaacctaaggcgctcctccaaattttcggaaccccagggtctactgttgccaaggcttcagggagcatcacagtctgagaagcattagggtatgacgtagcggtaggttttctctacacagtattaaagagatattgaaatcctcaagattaaaaaagagatgaacattgaggaattctgtaatgcagatgtgggttctacacaaaggttgctgagaaccgaggcattgccatgtagccccaatattcagtgttttagaaatcaagtttatataataaatgaacgttttgatgcagcaaatgaggaacctagacattcagtgaagagaattaaaaatatatgttattaagaaaatgtgtaactgaacaaaaccgaagagggccaaaaattagtaatcctgtgttcgaggtatagttttgaaagtttatatttaagagaaagactgaaagaaaatttgtatgtgcacacataattacaatacaattaaaaaatggtatttggtttattttagaacacttttgcaaaacagtggtctccaaagagccatgaaacagcttgctgatttttgaatttctgggtttattacaaatgactacataaaagccgtgtggtaagaaacgaacttctggtaacagatggtggaaaatcaccagtaagactcaaacctaacagagactgcttctggagccatggttctcactaagggttattagcatcattctttgatgatgggcattgaggcatcagaactcatggatgtcacagttcctgtgtggagaggaagcttcagatggtgctcttgcacagacgggactgccattcccattttagtggatctcttaaaagttcgaatggctcctctaatgcctgatgtgaatggaacctttctctctgcttcagtcaagaatctggtgacaaagaagcttcatcctttcaatcttacaatttcaatctcctatctcaagaaagctcatttctatgtattaccagtgcatcctccacatgctcttctgcagttgttccttctgcgggaaatgatctctccttttgtcgaggcttggtgaaatcctttgaaattctgttgattctgtaagagccaacacaaataccaactgccctgaatactttctggctaaactgccacaatgaacgaggattcctcacccatgtccctccctttcccttcctttctttttataatggtatgcttattgttttttaatgtaacatttttcttacaaaaggaatacacattcagtgttaaaatggaaatgtagaaaagtcttcagaagaaaataaaaatcacctgcaaatccatttcctgaagtaattatttttgctaatgttttattacaatatagctcatcctctttcgctgcctcttcctcttctctctcccttcctccctccttcctgtccttcctctgtctctccttccctttttctctctctctctggttgcagcatctctgttttttctctgttttttttttaatcaaatgtatcgaggtgtgacttacattcaataaaatgcacagttagatgaattttgaaaaatgtcataattcatattaccaacatctcaatcaagatatataatgcctccatcaccccaaaaagggacggatgatggactcactcatgctcctctgaaaaaaaccctttcccagctctctgccactgatctggtttctgtcactggagatgagttttgcctatactagggctttgaataaataggatcacagagcatgtactcatttgtgtctggcttctttcactcattatcatatttttgaaatagatccatattgttgcagatgtcaatagttcattcctttggtttcttacagagatttacttcctcaaatatttgcttgatttcacattcttgttgctactattactagaattcattttcaagttttaatcatcagtactataattttaaaaaagagtctttacttttagacgagttttatgtttacagaaaaattgaacagaaagtacagaaagttcccaaatactccctcatcccttccctgacagcttcccttatcattaatatcttgcattagtgtgttacactaatgttgtaattgatgagccaatattgatacagtatggttaactaaagtccatagtttacattaaggttcgctgattgtgttgtacatttcatgggttttggcaaatatgtaatggcatatatccaccgtcataatatcctacacaatagtttcactgccatcacaatagtttcacctgttcatcccttcctcccctgagcccttggccactaatgatcagtatttttactgtatccatagttttgccttttccagaatgtcattggaatcacttagtatttaaaaggctacccttttcagattggattctttcacttagcaatatgcatttaaggtgtctccatgtcatgatacctcatgtctccataagcatgatagcttatttccttttagtgctgaataatattctattgtatacctataccagtttatttatccattaatcccttgaaggacatcttgattgcttccaagtttgggcaattataaataaagctgctgttaacatcagtatgcacatttttgtgtggatataagttttcagctcatttgggtaaatacctaggggtgcaattgctagatgatatgttaatagaatgttcagtttcataagaaactgccaaactgtttttcaaagtggctgtaccattttgcattcccactagcaattaatgagagttcctgttgctccacatctttgtgagcattgatattgtcagtgttttggatctccgcctttctaataggtatgtagtggtatctcactgcacacctacatacatacatgttttaaaaaacagctactattaagtaaatttagcaaggtcatgaaatataagatcaatatacaaaaatgatatacatacatgtacatacaatatatacatataaattatacacataaaaacaacctacaaaatgatatacatacaatatacataaatacatagagattataaattaattctctaaagaaatacaatgttgaaaatcttctaatgtgcttttatgccatctgtataccttctttagtgaggtatctgttcagatcttttgctcattttaaaatttggttggttgttatcattgagttttaggagttcttagtgtattttagataccagtccatcagttgtgtattttgcaaagattattttcccagtttgtggcttgtcttttcattctcttgatagtatctttaacaaaacagagatgtttaactttagtaaagtctaagttatcaattacttcttttgtggattgtgcctttgatattgtatctaaaaagtcatcaccaaacccaaggtcacctagatttgctcctgtattattttctaggagttttatagttctgtgttttgtttctatatctatgatccactttgagttaacttttgtgaaaggtgtaagatctatgttgaaattcctcctttatatttgttttttggtagttttatttgcatgtggagtctattactttttactgctgagaagtactaccaaatagtatattctggtattcatgtgccacattttcttttttttctttggtcacttttttttatatatatactttaagttttagggtacatgtgcacaacgtgcaggtttgttacatatgtatacatgtgccatgttggtgtgctgcacccattaactcgtcatttaacattaagtatatctcctaatgctatccctcccccctgctgccaccccacaacagaccccggggtgtgatgttccccttccggtgtccatgtgttcttattgttcaattcccacctatgagtgagaacatgcagtgtttggttttctgtccttgtgatagtttgctgagaatgatggtttccagcttcatccatgtccctacaaaggacatgaactcatccttttttatggctgcatagtattccatggtgtatatgtgccacattttcttaatccagtctatcattgttggacatttgggttggttccaagtctttgctattgtgaatagtgccacaataaacatacgtgtgcatgtgtctttatagcagcatgatttgtaatcctttgggtatatacccagtaatgggatggctgggtcaaatggtatttctagttctagatccctgaggaatcgccacactgacttccacaatggttgaactagtttacagtctcagcaacagtgtaaaagtgttcctatttctccacatcctctccagcacctgttgtttcctgagtttttatttatcaccattctaactggtgtgagatggtatctcattgtggttttgatttgcatttctctgatggccagtgatgatgagcattttttcatgtgtcttttggctgcataaatgtcttcttttgagaagtgtctgttcatatccttcgcccactttttgatggggttgtttttttcttgtaaatttgtttgagttcttgtagattctggatattagccctttgtcagatgagtagattgcaaacattttctcccattctgtaggtttcctgttcactctaatggtagtttcttttgctgtgcagaagctctttagtttaattagatcccatttgtcaattttgtcttttgttgccattgcttttggtgttttcgacatgaagtccttgcccatgcctatgtcctgaatggtattgcctaggttttcttctagggtttttatggttttaggtctaacatttaagtctttaatccatcttgaattaatttttgtataaggtgtaaggaagggatccagtttcagctttctacatatggctagccagttttcccagcaccatttattaaatagggaatcctttccccatttcttgtttttgtcaggtttgtcaaagatcagatagttgtagatatgtgtcattatttctgaggtctctgttctgttctattggtctatatctctgttttggtaccaggaccatgctgttttgcttactgtagccttgtagtatagtttgaagtcaggtagcatgatgcctccagctttgttcttttggcttaggattgacttggcaatgcgagctcttttttggttccatatgaacttcaaagtaattttttccaattctgtgcagaaagtcattggtagcttgatggggatggcattgaatctataaattaccttgggcagtatggccattttcacgatattgattcttcttgcccatgagcatggaatgttcttccatttgtttgtatcctcttttatttcattgttcagtggtttgtagttctccttgaagaggtccttcacatcccttgtaaattggattcctaggtatgttattctctttgaagaaattgtggatgagagttcactcatgatttgggtctctgtttgtctgttattggtgtgtaagaatgcttgtgatttttgcacattgattttgtatcctgagattttgctgaagttgcttatcagcttaaggagattttgggctgagacgatggggttttctagaagtcatcggcaatcatgtcatctgcaaacagggacaatttgacttccttttttcctaattgaataccctttatttctttctcctgccttatttcctggccagaacttccaacactatgttgaataggagtggtgagagagggcatccctgtcttgtgccagttttcaaagggaatgcttccagtttttgcccattcagtatgatattggctgtgggtttgtcataaatagctcttattattttgagatacatcccatcaatacctaatttattgagagtttttagcatgaagggctgttgaattttgtcaaaggccttttctgcatctattgagataatcatgtggtttttgtctttggttctgtttatatgctggattacatttactgatttgtgcatgttaaaccagccttgcatcccagggatgaagcccacttgatcatggtggataagctttttggtgtgctgttggattcggtttgccagtattttattgaggatttttgcatcgatgttcatcagggatattggtctaaaattctctttttttgctgtgtctctgccaggctttggtatcaggatgatgctagcctcataaaatgagttagggaggatttcctctttttctattgattggaatagttttagaaggaatggtaccagctcctccttgtacctctggtagaattcagctgtgaatctgtctggtcctggactttttttggttggtaggctattaattattgcctcaatttcagagcctgttattggtctattcagggattcaacttcttcctggtttagtcttgggagggtgtacgtgtcgaggaatttatccatttcttctagattttctagtttatttgcatagaggtgtttatagtattctctgatggtagtttgtatttctgtgggattggtggtgatatcccctttatcattttttattgcatctatttgattcttctgtcttttcttctttattagtcttgctagtggtctatcaattttgttgatctttcaaaaacccagctcctggattcattgattttttgaagggttttttgtgtctctatcttctttagttctgctctgatcttagttatttcttgccttctgctagcttttgaatgtgtttgctcttgcttctgtagttcttttaattgtgatgttagggtgtcaattttggatctttcctgctttctcttgagggcatttagtgctataaatttccctctacacatggctttgaatgtgtcccagagattctggtatgttgtgtctttgttctcattggtttcaaagaacatctttatttctgccttcatttcgttatgtacccagtattcattcaggagcaggttgtccagtttccatgtagttgagtggttttgagtgagtttcttaatcctgagttctagtttgattgcactgtggtctgagagacagtttgttgtaatttctgttcttttacatttgctaaggagtgctttacttccacctatgtggtcaattttggaataggtgtggtgtggtgctgaaaagaatgtatattctcttgatttggggtggagagttctgtagatgtctattaggtctgcttggtgcagagctgagttcaattcctggatattcttgttaactttctgtctcgttgatctgtctaatgttgacagtggggtgttaaagtctcccattattactgtgtgggagtctaagtctctttgtaggtctctaaggacttgctttatgaatgtgggtgctcctgtattgggtgcatatatatttaggatagttagctcttcttgttgaattgatccctttaccactatgtaatggccttctttgtctcttttgatctttgctgatttaaagtctgttttatcagagacttggaatgaaacccctgcctttttttgttttccatttgcttcgtagatcttcctccatccctttattttgagcctatgtgtgtctctgcatgtgagatgggtttcctgaatacagcacactgatgggtcttgactctttatccaatttgccagtctgtgtcttttaattggagcatttagcccatttacatttaaggttaatattgttatgtgtgaatttgatcctatcattaggatgttagctggttgttttgctcgttagttgatgcagtttcttcctagccttgatggtctttacaatttggcatgtttttgcagtggctggtaccggctgttcctttccatgtttagtgcttccttcaggagctcttgtagggcaggcctggtggtgacaaaatttctcagcatttgcttgtctgtaaagtattttatttctccttcacttatgaagcttagtttggctggatatgaaattctgggttgaaaattattttctgtaagaatgttgaatattggcccccactctcttctggcttgtagagtttctgccgagagatcagctattagtgtgatgggcttccctttgtgggtaacacgacctttctctctggctgcccttaacattttttccttcatttcaactttggtgaatctgacaattatgtgtcttggagttgctcttctcaaggagtatctttgtggcattctctgtatttcctgaatttgaatgttggcctgccttgctaggttggggaagttctcctggataatatcctgtagagtgttttccaacttggttccattctccccattactttcaggtacaccaatcagacatagatttggtcttttcacatagtcccatatttcttggaggctttgtttgtttctttttattcttttttctctaaacttctcttctcacttcatttcattcatttgatcttccatcactgataccctttcttccagttgatcaaatcagctactgaggcttgtgcattcgtcacatagttcttgtgccgtggttttcagctccatcaggtcctttaaggacttctctgcattggttattgtagttagccattcatctaatcttttttcaaggtttttaacttctttgccatgggttcgaacttgctcctttaggttggaatagtttgattgtctgaagccttcttctctcaacttgtcaaagtcattctccgtccagctttgttctgttgctggtgaggagttgcattcctttggaggaggagaggcgctctgatttttagaattttcagtttttctgctctgtttttccccatctttgtggttttatctacctttggtctttgatgatggtgacatacagatggggttttgttgtggatgtcctttctgtttgttagttttccttctaacaatcaggaccctcagctgcaagtcagttggtgtttgctggaggtccactccagaccctgttttcctgagtatcagcagtggaggctgcagaacagtggatactggtgaacagcaaatgttgctgcctgatcgttcctctggaagttttgtctgagaggagtacctggccgtgtgaggtgtcagtctgcccctactagggggtgcctctcagttaggctactcaggggtcagggacccacttgaggaggcagtctgtctgttctcagatctcaagctctgtgctgggagaaccactactgtcttcaaagctgtcaaacagggacatttaagtctgcagacgtttctgctgccttttgtttggctatgccctgcccccagaggtgcagtctacagaggcaggcaggcctccttgagctgtggtgggctccacccagttcgagcttcccagctgctttgtttacctactcaagcctcagcaatggcaggcgcccctcccccagcctcactgctgccttgcagtttgatctcagactgctgtgctagcaatgagcgaggctccatgggtgtaggaccctctgagccaggcacgggatacaatctcctggtgtgccgtttgctaagaccgttggaaaagtgcagtattaaggtgggagtgacctgattttccaggtgcggtctgtcacccctttccttggctaggaaagggaattccctgaccccttgcacttcccgggtgaggtgatgcctcgccctgctttggctcaagtttggtgcgctgcacccactgtcctgcacccactctctgacaatccccagtgagatgaacctggtacctcagttggaaatgcagaaatcattcgtcttctgcatcgctcaggctgggagctgtacactggagcagttcctattcggccatcttggctccaacccccagaagtctttatttggccatatgttttaatttctcataggttaaaaatctaggattagaatcactgggtactaagccattctaaaaaaagtactaagtgtatttttatttattaaaattaaaaaaaccctaccagactattttttaaattggttgtacgattttacactccccagtattaatggagaagagttctattttctgcacatcctcgccaacacatgctatgtagagccttcattaattttggatattttagtatgtgtgtagttgcagctcattgtggtttttaatttgcatttgcctaatgactaatgaagttgagcatctttttatatggttattgatcattcacatatctacttttgtgaagtgcctgttcagatcttttgcatgaattttaatgggttacttggtcttattattaatattaagagatctttctacatttagatataaaactcttgtcagctatatatattgcaaatattttctccagctctgtagtttgcgtatttatttttaatggtgtcttttgcagagcacaagttttccattttgatgacatctgatttatcatttcttttttttaatggttattgttgtttatatcctctttaagaaacttttgcctaccccaaagttgctccttcaatgttttcttctagaggtttcagaattttagctcttcgattgaagtctgtaattcattttaattcttgtatgtgatgtgagatagggtttaaagtttatttcttttcttcatgttgctatccatttattctagcaccattttttgaaagggctacccctacaccaattggattttcttggcattattataaaaagtcaattggccatagttgtattgatctattcctggattcactactctgtccagttaatctatatgccatccttatgccagtaccacattatcttaattactgcagtttgaaagtatgtcttgaagtcaaattatgtaagctttcttttttcctttttttttgtttttttttttcctgagacagagtcttgctctgttaccaggctggagtgcagtggcacgatctcgacttactgcaatctgtgccttccaggttcaagtgattcccatgcctcagcctcccaagtagctgggactacaggcgcacaccaacatgcctggtgaattttttttttttttgtatttttagtagagacggggtttcaccatgtgggccaggttagtctcgatctcctgaccttgtgatccacccacctcagcctcccaaagtgctgggattacaggcgtaaaccactgtgcctggcccagattatgtaagctttctatctatggtcctcatcctcaaagttattttggctattctaggtcattttcattttatatatattttagcatcagcatgttaatttctaccaaaagtctcttgggatttttattaggataacattaaatctatacatcaatattgggagaattaaaatcttaacaatatctgctctccatatagtatgtctttacggacctactatatttctctgcttatttaggtatcttaaaatttctttcagcagtggtttttcagtttatagagaataggtcttattagattatcctaaatcatgtatgtttcaacggtcctgtaagttctacttttaattgcatttgccaatttttcattgcttgtatatggaaatacaattcatttttgtatattgatcttatatttcatgaccttgctaaatttacttaatagtagctgttttttaaagtagattccttagagttttcttcagagtctatcatgttatctgcacatcaggaaagtttacctctctatacctagtcagttttgtgcctattgcattccttacctcatttcctgtgctgcccatggtccattgtctgaaaataaattttagatagtttgtccagattcctaactgtttacaacaggaggacaaatctggtacagtaattcatcagagccagaagacagaatttcatgagatcaattttagcacagcttattccaccaaatcctactttgtatacttcatttccattaaacaatatcattaaaatgtcttcatatcgtcaaaaaacttcataaaaacttccatttaataactagtattctatcatgtgaatattttgtaatctattcaattctttattatcagactattaggttgttttcatgagtttgaatattgctgtagcaaaccttcttatgtgctctctttgtgtttctgatactttttacttacttttggaatagtaattctctcactgtattataggatttttgtgggtttctcgaggaggagaacaatgaattacaactctttacatctgcccgatgcctagcagtccagggaatatcaaagaaactcagtaaatttcccatgaacaaatgggacttggtgctccttgcgaagtgattgaactacacagatgatgccttttatgtttgtaagcttgaaccttttcaagacacacttacgatcttcacattcctgggaggtcagaaagttgtatatcagttctgctataagatagaagaaacaaatacagagaggtaggaagtcaggccaagcagctagtccctcgcagtgacaggaccagggtctcagtcacctctctcctattcctgtgccttttctacctgctcctctggattctctgaaccaaggcagccacccagaggtctttggaatttctaggctccagtgctgcatgctgctctccaagtaagagcagaacacagtgagcttccaaaggccttcctaggacagagctttcctctgggaacctggatttaggggttggtcagagccttttcgagagcccattgatggtgattagtggaaagactccggctagccttgaatatctccagacccactatttcctgtcatgttccatttggcagtgtgcccagatttaatggcattctacaagggctattttataagtatgtgctttgaaatgtgctttaaagaacatattctgaaggagagctttcacattgtcagtgttcctgtacttcactggctgtagagacaataaggacacctttacatttaaagcttagtatccagaggttgataccgtccacccatgtaacagagggagctcagaccacatttcaaaattcaacacatcttttaacagaactctgcactcagggtccagctcttatgctcctggaacagattgttccaaggttgaattcagaccgccgccatttctttgctccaggctaatcttaaatgttccacctgggacactgcttgctccagcaccactctttgcttatactgaacctgatgccctgatccttggctcacctgtccacctgccatcctctgcaccaccagttaatgctgggttcacactgttgctcagtctggactgtccttaacactctgctgcctgatctctgcctccgctgccaagccccttgcatttgagctgctactgttcccctccaggatgccattctctcccctgcgcctcaactgcgggtatagctcagtgcactaccaacattggcgcataatgtgcttccccaaagttatcgggaaattattcctctgctgtagagtggttcaataacatgttgctaggcccaaaagttgtgcagaatatagaaagacagctttactgatcttgcacctatcctgctgtttctgtgacatgaatatgatcagtgaggagtatcgtgttcttaaaactcagctaacaacaccatgcagtggccaggacagcatttcccttcactgtttggcccttactattttttttttcttttttgagttagagtctcgctcttgtcacccaggctggagggcaatgacgtgatctcagctcaccgcaacctctacctcccaggttcaagcaattctcctgcctcagcctccccagtagctgggattacaggggcacaccaccacgcctggctaatttttgcatttttagaagagatgcggtttcaccacgctggccaggcaggtctcaaactcctgacctcaagtgatccacccacctcggcctcccaaagtattgggattataggcgtgagccaccatgtctggccagcccttactattagtagaatgtctttctcaggagttgttcatttgtcacttatattatttcttctgtggctcttcccacacacaccacgccaagtcttcatgcctccctgtgtatgtgtgaactgcagtagtggacaagtgtgaattattttcccaggaagtccttcagtgtgcacatcaatcaatgaaaaaaaataaacctggggtgggagaagaacagaaagggtaacagaagtatctgaattccagttttggtctggccttgatctataccatcctatgaattttagatgaagtgtcacctaaaatcctagcccatttatggaagtgttttgagctcttaaatgtagatcttagtgctgtctgtaattaaacatccttttaagaggatgtaatgatctcttgtaatgatcatagcattatcaggactagaaggtatctttaaggtcaattaatcctgataccagtttttacttattctaagctggaattcaataatcctagaaaaaagtttgtgatttccttgccacctggcagccccaggtgttttcttttacttactaaacgctccatttgggggggttttcttttttcttttttcttttttttttgagacggagtttcactctcatcgcccaggctggagtgcaatggtgcaatctcggctcactgcagcctctgcctcccaggtccaagtgattctcctgtttcagcctcctgagtagctgggattacaggcatgcaccaccatgtctggctaatttttgtatttttagtagagacggggtttcaccatgttggtcaggctggtctcgaactcctgacctcaggtgatccgctcgccttggcctcccaaagtactgggattacaggcgtgagccacctttgcctggcccatatggaggcgttttatgtgcattagtttgctagggcgtagcaaaataccaccaactgggtggcttaaacaagataaatttagtttcctacagttctggaggctgggagtccaagactgaggtggcagcagggttgatttcctgtgaggctgagagggaagggtctgctccaggcttgtctccatggctggcaggtggccaccctccccgtgcctcttctcatgggggtgcctctgagcacacactcttctagactctcttcctcttctcataaggacaccagtcatatgggattagggccccaccctaatttcctcattataacttaattatctctttaaagacctcacctataaacacagtggcattctgagatactggggttgggatgtcaacacaggggtttggtgggggtctgggggagcacagttgagcccagggcacatgacagtatgtttagagtctcctcgctgttctgttttttctctgctaaagatgctcctgtgaactgttttgggcgggatatcttagacaagaaggataggtaatttcagtcacaggttttatgtgaaaagttgttggtagagacttcattccccacaaggtggagcctttcttttattgttttcttttttttttttttttttttgagacggagtctcgctctgtcgcccaggctggagtgcagtggcgcaatctcggctcactgcaagctccgcttcccgggttcacgccattctcctgcctcagcctcccgagtagctgggactacaggcgcccgccaccgcgcccggctaattttttgtatttttagtagagacggggtttcaccttgttttcttgctcttccttttcccctctgtgggtgtgtgtgcgtgcgcacgtgtgtgtgcctacacgcacatgcatctctatgttacttgggcttaaagatgagtctctctcttatttgacaccaaggggagatagatagctggcctctgcttgcttagaggctcaagcctttcaatgcagcatttatttcttgactactggttttgccaggcactatgctggacatgagagatgcatgaataactaagaaacagctctgccctctaagctcataaattatggacaatatacatataaatacatatttataatgcattgttaaatgcagcaacagaactgtgagccaactacaggggtagcacagagaaagtgcaatcaatacggagcaggcagagaagagtttgcagagaaggtgatttcaggtgtgggtgttgaaagacaattaggaacctgtgtgatggatgcaggggcgcctatgtgatgtattttgagaataacagtatttatggatataaatgaaagatgaggggtagcagaagtgatgatactgcagagaaagggaggagccaggtcaggatgtaggccatgcttttactagagggttttaagcaaaggaataacctaatcagttctgtatttggaagacagcttttgtgactacatggagatggatgtaggaaaatgacagggagaccagtttaggctctattgcaatatcttaaataagggataatgagcagctcaattaaaaccctggcagtgggaattgagaagaaagggacataattgaagaatattttggacgtaattttgaagggacttggcagctgattgaatatgggatagtgaggggaagtaatcccagtttctgtcttaggtcctggtaccaccagctgaacatagaagacagaagaggagcagctttaggggtgatgatgaattctgttacacatgctgacgttatgggtctgtgggaatcccggtaggatggccagtggcacttgaaggagagattgaggcttatattaggttgttgcaaaagtaattgcggttttgccattgcaagtaatggcaaacaccgcagttacttttgcctaatgtctctcactgatttctcagctcagacttaacttcttggagatgctaattctggaaaaagtgtttccttggaattaattttgtaatgcctatataataaagctattatcacgtgggttaacagtccatttggtgctgggcttatttgtatttgaaactcaacagatttacaggcaattgcactccacaaaactattgtctcgggtaatggaatgttcccattgaacagttgaaactcatttttaaaaaaactcagtggtactcattattgtctataattgtttttttcaagttcttactattttgtgggggtatttctcagcacccactttgctacaatgctagctcatattagcccagtaaattcttttaatgcacacaagcaaccttctattttcttccctggatgctcccaggaagatgacagacattcttgctggtatcctactaattactagagctaatctatggcttttagtaacagtccttcgtgtatacactctgcaagattattttgcctttggagagaaaaacttttatatgatttttaccttgatctttttcaataggcctcatgccatgttatagagcatacctatactcatgtttagtaatactggacatacaaaccatttttttctaatagcattagattacaactagcctgtgtaacatcgatctacttttatattctttctacttactgtgtattgtctcattaatcttcacgctggccctgtacaagggagtaagtgtcttttccatttggaaattgaaccaaaatggagtgctcttgatttactcaaggacatacttcaaatttatattgaaacagagcccagactccagtttcttttgtcttcccaattctgtttgtatctacttcttttaaattcctctaccatttttggttatttttaatccacaagaagtatgtcttactctttaaatctaggtttgggaactccagcagcaccgtgatgtattgctaattgaattatcctttgggggctctgattaagcatcattgtactgctgaatgttaacatgctattttagacttacatttcagatcatacttgaacattcttctttatattttcttctgtctcttttctgtttttatgtgtccttttttctcttttctcttgaaatctcaaggtatttggagattaagaaaataaaataaaatattctctttttactcctaatttcttcttaaaaataatctttaagactcaaatgattttaccatttaagaagcggtcacaccttggatacttgtaaattgttcatttgatgggctccataatctgaaattcatagatggaacacacggatttgataaagtagagactgttaaccaagaaaaagaaaatattttagattttaaaatatagagtctatttaactttattttttgtcaaaaatagttacaactttagtcatttgatcaagtaaaattactgataaatttcgttcaagccaaagcgactgctgcatttaacagactacaccagttcataattgagaatatcaagtagagaacattatactttgactccaggtttacacagctgaaagcagtactgcattttaattccaacagccttgtgaacaagaatatacttttacacagcaatatgtaagcagtccttgcccagaatttggctgcagagacagacattgtaggatcattctaggtttcatctgcaaactcataggaatgatcagcagggtttgccttctgctctatcggcgcaccttgacactgaatcagatgcctggtcattcagacatgttcaaaggcatcgaagcaaacaaagtgtgctccttattcatcaaccatctgagaatatctttagaaattgtgaggttatcaagcccatgcatcttcagtttctcaaaatcaatgattccactgagccccaagtagctccgtggtgggaaatgagtgcagactccattttctgctctgtgaacaagtccaatttaaatgcaaacacctgcccttccatgaacaaatcagcagtgctttctttttccacagttttaagttcaatgtgcttagatatttttgcaacaccaagtgaaatacataatcttgtgggttattgaaatcgaacagggtggtctcccagagtcccttaatttaaaaaaggatggtctgtggaagcagctcagtcaatgttttcagcaagtttctatcacttcactgacttaattaaagcaaattgctttcaaatactccataaactgggatagctaacagtaggaacatgaagaaaaatcataatcttggttcttctccagctcattatgtaacaaacttgattggcttcaaagttcagaacacattttgttgtaggaaatactctcaccaaaatagtcatagttcatctaaaactctgttttaggaatccagccagtgttgtcattgtgtattgtgtatggatatctagtatttacggtacttctttaaattctcctctgtcccttttctctttttatatgtccttttttctcttttctcataaaatctcaaggtatttggaggttaagaaaataaaataaaacatggatatctagtatttacagtactagatatagaagaacaactaaaccttgagggtctagcaaggtggatgatatattttaaacccatttcgctcaggaattaacttcctaagcaccaaagtgagtcagttatgggcttccaagaccttcacttcctgctgcctcataggcagctgcaatgggattggctcctcaggagtagcctaaatctgaggaaggtctcttgtaaaatggaaggagaaaaggacatcctagagtaaccagcactgattttttttccaaaattatttcttgcagtctgcaacagaacaaggtttggggctggggcagagatggaggaatttgcaggtttaggacaggaaccgagaggtgtaaagggtaggtgcagctggaacagggaggtggcagatgctctgacatagcccccctgggaaggagtctaaggaggtgaaaggcagacagcccaggccagctccaccagggagcccttgataagtttagtcctatgtcatgttggtgcttggactctctcactgctcaaagaaccactgtggcctggaaggggatctacagtgtttttcgtgccagagacctggccacattgtcttggacaaggactggtgtttgaggagcccactaacctcaaaggggagcgcctgagtcccgcattagcgctgcaggatacaagcaagcggagctgggcttctgagcacagctgagattcctggacacagaaagaagacaggggcaggaaaggaagataagtttttactcgttgggtaaatgaaggtagacatgagttttaatttgaaaagtagaagaatgccatctagttttatccataccgaagctggcagagccagtatatcaattacatttgcctctccttcatcaccacgagtattgatatttgtagtgttaatagtaataataggaagtattattcagtattaataattgaacacctattatgtggctagactctagtagctgattacatttttcttaattcttgtaacattgcatggttggttttatgattcttgttctacgaaggcttagaggtgggaaaaatgaactatcttgcctaaatccacccggttaaataagtgatggccccacaatccaaacccaggccagtaggattctacagcctttcccaattttctttctttctttctttcttttttttttttctttgagaccgagtgtcgctctgtcgcccaagctggagtgcagtggtgcgatctcggctcactgcaagctccgcctccggggttcacgccattctcctgcctcagcctcccgagtagctgggagtacaggcgcccgcaccacgcccggctaattttttttgtatttttagtagagacggggtttaactgtgttagccaggatggtctcgatctcctgacctcgtgatccgcccgcctccgtctcccagagtgccgggattacaggcatgagccaccgcacccggcagcccctcccaattttcttggcacccatctggtttgcttttcctggtgcatcaagctggatcgatacagtatttatcatgaagggaaatgattttacatgggcagattgtgggctatagcctcagataagctttgttatctgtatactatgctggtgattttgctttggggaagcaactgtgacgttatgagtcctgttttcagctcttcttctctggacctacacagcagtctgttctgattgtgcagccatagttctaagtgctggatggggatgctggcaggggttcgtgcatgttccctggacagcaagatgtgtggtgcaaagagcttctacacctgggcaacacagcaagaccccatgtctaaaaattttttaaaaattagctgggcatagtggcttgtgtctgtagtcccagctactcaggaggctgaggagggaggataacttgagtctaggagttcaaggttacagtgagttatgaccacaccactgcaccccagcctgggccacagagcaagaccctatcgaaaacaaagcttttacaaatacatgagaaaagacaactcaatagaataatggaccaaaatgtgagaaggtgaaattcagaatccagagaccaataaatacaagtggacaataaatacttgaaatgttgctgaactcacacattattatggccatacagattagagaaacatcacgattctgttttatgtctatcagcttatcaaaaaagaaaaatgattggtaacatctatggtcagtgtagggcaggaaagcatccccatttgggagaatgtaggcacagcttctctggagatcaatttggcatacctactaactctttaaacatctatacaagcaatcccacttgtagaaatgcactttcaagatacgctgatgcatatatttttaggatatttattgtggcattgtttaaagtagtaaacaaagaggcaatccagatgtccatttccagggggactcttaagcagtttgcagctaatcagtctagtgtggcagttacgactgtggactttggaaccagactgcctgagtctgaatcacggcttcactgctcactagctgtatgctcttgaggaagttatttttcttctcatgtctcagttttttcatcagtaaaggggataagaaatagtacctatcttatagggttgttgtgagtcatggttgagttaaaatgtgtaaaccacgtggagcatgatgcatagtaagaattatggaagtgtttgctgtggttgttattgctattattattttgtgaaataccattgtcatcaaagaaattaatgggaaaaagtatatatatatgtgtgtgtatgtgtgtgtgtgtgcgtgtgtgtgtatgtgtgtgtgtgtatgtatttacatatgctgatattgacccagaatagtccatcataaaaactgttaagtaaagagtagaatgtttcagaacaatgtgtatggtaaaatctcaattagtataataaaaattaaaatcatgtttgtaaaggtctgcagatataggcacaacactgtccacagtaatttaagaagtaagttatttaattaatttgaggagtgaaatgtcagtgaaaagtaaagaaaggctattctattttactttgcccccaaattacttgaatttatttactacaagcttatctcactttgcaatgaaaaaaataaggataatttacgtatctggctggcatattatgaggctattacatacagtttgtctgtatattaggtgttgatctaaccatcatattggaaagattatccagcagcttccagcataacttaaaaatggctctgttcaaaattaggttacagcccatcacaaatgcttaaagtcaataaatcactatgaaaactaccatttggggatgtgagttgttttggaactcaaaatactttggctatgttaaaagaccttgttatgaaaataacagattttcatttcctctctaattttataactcttggcactccaacttttgttttgctgtgaaatgtttgagaaggaaatgagtgtacacacagttttattttccaaaataaatacaattttaattctgccaagagattgtagggctctgtgacatagagatattgctttggggggcggttctactgggggcacagtggaaggggctttcttcagagctctgaactcactcatgagtacctaagtcacagatagactgaaacagcttataaactctctaacaaaggccattttgggatggtgcttctcagggatgcttgggaaccatcgttcagtagtaaggactcccatgcacacacaccacctggtgggccctcatggtaacttcaatgattgtgtcttaggaacgccggttctgtttaacttggattttcccatcattgcacagtgttgagaggtcaagttaatgaagaagatcatatttctgtattcataactctgctagttccattttctagtgataagggaggggatgaggtaattgccaaattgctatatttggtcaagaaacgagattgctacaggaattctaagaagactacttttattctttttggaggagcaaagggactctttgctataaaaaccacaaagcctttcttttcttgcttgtacttaaaatgttgagaaatttaagcagtacaaaagtgcacagactactataaccactaccttcaagatatccagaactgacaagtgttaacatttggtaacactgaatatacattaccatttttaactaaaaagaaacaaaacattgcagagaaagacaaagtttcttttagtaaaaataatttatttattaaattttattataattaacaagtgagaattgttacaatgtgatgttttgacatacgtatttacattgtgggatgattaaattaagctacttaacatatccgtcacttcacagacttaccttttttatggtgaggacatttaaaatagattattctcacaattttgaaatatattattgttaactatagtcactatgctgtgcaatagatcttgaaaacttattcctcctaactgaaacttgttagcctttgaactacatcttcctatttcccaaccctccccactcagccctggtaaccagcgctctattctatttctataagttccacttttttttttttttgagatggagtctcactctgtaccgcaggctggagtgcagtggcgcaatctcagctcactgcaacttccgcctcctgggttcaagcgattctcctgcctcagcctccccagtaactggaagtgcaggtgcatgccattgtgtcgggctaatttttgtgattttaatagagacagggtttcaccatgttggccaggctggtctcgaactccttaactcaagtcatctgcccgccttggcctatcaaagtgctgggattacaggtgtgagccgccgcgcccagccgagctgcactttttataagtaagagcatgcagcgtttgtctttttgtgcctggcttctttcacttagcttaatgtcgtacaggttcatccatgttgttgcaaatgacaagaatgtccttcttttttaaggctgaatagcattcctttgtgtatatacaccacattttctttacccattagataaagtctcttttgaacctgtccctaattgcatgcccgtactaatttctcactagcagtcactattattaatctgttgagtatcttgatggtccgtttttctacagttctattcagtaaatattactgaatatctcctgtatgccagcgctacacacctaggatacatcaggcaacaaaacaaacaaaaatacttcccttcatgaagcttacagcctaacaagggaagacacataatactattttgcaattatatgttatattagaaaagtgccacagagaaaaaagtaaaattagagtaggatgggggaatcagaattgtatgtgggaggtgggcagtattcagcataaaatgaagtggccaggataagactctttgacaagatgtgatctgagcaaagccttgaaggaggtaaaggaattagccaagtggttttccagaggaagagcatctgagactgggtaaggatgtgcctggcatttctgttttctttccctccatgagccagagtcttgctctgttgcctaggctagagtgcagtggcacgatctcggctcactgcaacctccgcctcccaggttcaagcaattctctgcctcagcctcccgagtagctgggattacaggcatccgccaccatgcctggctaattttttttgtatttttagtagagatggggtttcgccatcttggccaggccagtcttgaactcctgacctcatgatccacccgcctcagcctcccaaagtgctgggattacaggcgtaggccaccgtgcccggccgtgcctggcatttgtgaagaacagcagagaggccagtgtggctgcactggagggaacaagtgtgagaataaaagtagaataaatggaagaggggagagattagcagcagagcccaggaaacaagatcatgcagagcctcctgggccattgttaaaactttagctcttgccctgaaataaatgggaagccattgcagagtttcaagtagacaagtgacatgatctgattgcacgttgtgtttgagaatctattataggttataaggtgataagagtataataaaggagaccaattaggagtccatgtaataatccaaaagaaagatcatgttgggctggatcagactggtaatagtgtgcaggtgagaaaggttcggcttctggatatatttatgtattttgagtgtagagtccgagtgatttcctgagagattaaatttggagtatcagtgaaagaaaggagtcaaggaagattctctttccttaattgaggtgaaattcatgtagcctaaaatgagccatttcaatgtacaattcagtggcatttggtatgttcgcgatgatgtgatcacttctatttagttctaaaacatttttgtcaccccataaggaaactcatacccagaaagagtcacctgccattttttccttttccaagcctctggcaaccacaaagataatttctacttctgtagatttacatattctagacattgtatgtaaagggaatcacacaatatgtgacctttcgtgtctggcttctgtcacttagcataatgtcttcaaagtctatcatgtagcatgtgtcagcacttcactcctctttagggtggagtgctatttcactgtatggatagacaccactttgtgcttctctattcattcatcgatggacatttgggctgttcccactgctgaccatggtgatggtatgatgatgaaaatgtatgtttgtttcaatccttgttttcagttctttggggtatatacctagagttggaattgctggattacttggtatttctgtgtttaaccttttgaggaacttccaaactgtttccacagtggctgtactattttatagtctcaccagaatgagagaatgagggtttcctcaccaccttttgttattttctattatggttttaaatttttattagagccacccttgcaagtttgattacaaagcttttggcctacaaaaatagaattgccgtaactgaggtaaggaaagctatgtgctaaatagggaagaatgggatgatcagcgttgagtttgggcagggtgagatgcctcctaaacatccaggtagcactgttgagtagactttggaaagataaatagatttgggctgaaatataatataggagccactggcacttagttgccattgaaatccttgggactaggggaccataaagggctcaaaggtactccaaaattaagaggttgggtcaaaaagaagggacatgtgaagtggacagaaaaacaacagagttgcatgtactgaaagggcaagtgagaaaattgtgtcaaggaggaggaatgaatgactacgtgaagtgctccgaaagattaagtaagattaaaatcgagaattggggtttggacttggcagtgtggaggccatgggcaaccttaatgtgagcaatgtcagtggagaggtggggaatggaggtactcggtataactgaatgataatgctttccagatatcgtcacacagggaagggaagaaatgggacaatggctggtggagaatatggggagaatggaaggccttttttgtttctttttttttaatatgggaaaaataatagtattctgtatgctaatgagtgtgatccagcgtagagtaagaaaattgattttttttttcatagaagagggtgtaattgccaaagagatgtcctgagtgtacacgaggatgggatacgggtacaagtagaggcactgccttgagatgggagtgtggccagttcattcttggtcatagatgggaaggcaggtcctagatacttactcagatgctggaaagtgtgaagagaaggcagtgtggtctgtggatgtgaagtaagaggaagaccttaagctgagggtaagaatgagagagaaggcgttggaagtttggggagaggtcaaggagtgtgaaataaccctttgggagactggatgaatgaatggagtagagataagaagcacgactgcttgggaacattaggagtccgcttgcgatgcagcatgaatttggagtttgtttttccctagtcttgctgggctgcaccagttcaggagtacagagttggaggcattgaaggctggatgacaagcaagtgcaacaaagcagaaggggatgggcatagagagcatggacaagcgagtgtctctactgactgggtttgattttaatctggataaagaggaaagagacaatatcatgtgctgtagtgacatggcactgtgatcaatggattgccaatcctaatggggccgaaaactggttgaagttacagtaccacagacagtgcgaggaaaagatatgagctcgtgggaagagtgggaggcatgagattgacattacagagcgttcgcagctagtgataatgacacggaagtgagtagtggaggcagcgtggaggagaagggtattgaaagtgatggtttaaggaaatgaagcaccagtgtgttggaaagatcatctacatatatggtgacatttttagaattaaggcacaagtaatgttggagacagtgacagtgagaaaaaaggaattgactcaggaatcagtggataatggtgccactgaggagtattggatgatctagtctgatgacaacaggaacttcttttgggagaagaaagggagaatgaatggtctcaaagtggcagtgaggaacagtgaggttatctatgcagacctcctcatctggtggcacaaggtctaagggagaaaacacagcctcccctggagagggttacagtccaggcaatggctccaggggagagtcatttttcttccttttttcttttttttttttatttcaacttttattttagatacaggggggtccatgtgcagattttttacatgggatgctgaggtttggagtatggatcccgtcacccaggcagtgagcataagtagtttttcaacccacgcccgttcctccctccccactctagcagtccccagtggctcttgttcccatgttttatgttgaggtgtgctcagtgtttagctcccacttagaagtggttttctgttcctgtgttaattcctctaggattatggcttctaactgcatccatgtccctgcaaaggacatgattttattcttttttatggttgcatagtattccatggtgtatatgtgccacattttctgtatccagtctaccattgatgggcatttacattgatttcatgtctttgctattgtgaatagtgctgtgaggaacatatgagcgcatgtgtctttttggtcaacacatgcattagtcttggcaaagaatttttggcaaagccctcaaaagcaattgcaacaaaaagaaaaatggacaagtgggacctaattaaatgaaagagtttctgcacagtaaaagaaactgtcaacagagcaaacatacagctctgtatgataggagaagatatttgtaaactatgcatttaacaaaggcccaaaatccagaatctgttgagaacttaaataaatcaataagcaaaaaacaaataaacccactaaaaatgggcaaaggacatgaactgacacttctcaaaagacaaacatggaaaaatgcttagcgtctctaatcatcagagaaatgcaaatcaaaaccacaaccagataccatctcacaccagtcagaatgactattactaagaagtcaaaaaacaacagatgctggcaaggctggggagaaagggaatgcttatacactgttggttggaatataagttagttcagccaccgtgggaagcagcctggcgatttctcaaagagcttaaaacagagctaccattcaacccagcaatcccattagtgggtatatacccgaaggaagataaatcactctattgattttccattagaataaagaggagtaggacaggttgagaaatatatattaatggacaaattatttattgtatgtatgtgactttttaaaaataaaaggcaatgtggtatttgaaatcaaattattaacatgattgcaatcccttcctgaacatatgacctgtgacttagagaaccagctacggcatactataatacacctccaacagagtcccagcacataaaaggccttcaactgtgtgttgaataaatcaatataaaatatcactatgccaggttgagatcaagggggatatggcagagacttagaatttctaagaaaatgggatgttccctgtcagggttctattctattcaacaaactacttattgagaactgagtactggctatgtgctgatattgaacaggacagataaagtccctgctcttttttgagacagtctccctctgtcacccaggctggagtgcactggcgcgatcttggctcactgcaacctctgcctcctgggttcaagtgattctcctgcctcagcctcttgagtacctgggactacaggtgcatgccaccacatctggctaagtttttgtatttttagtagagatggggtttcaccaccttgcccaggctggtctggaactcctgacctcaggtgatccactcaccttggcctcacaaagttctgggattacaaacatgagccaccgtgcctggcctctgcttttttttttaatggagcttaaatttaaatgagtataattcatggacataagactagatttttaaatgaagagacttgtgcatgattgggatattttggcactatattcccaaatattactgaaaattttattcagaagtgtgctcattcttatgtgtaactagaccttttcacagccccattacacttggggatgtgtgtgtatgtgtgtgtatgtatgtatgtgttgtttgtgtgtctgtatagggaggagcagaaggcagtagatagagaggaagagtatgatgtctttattatcttcttccttcctcctttcattctcaaatcaagtttgaaagcctagagtgttgaacatgggactataagaaattatgaagtttgaccttctgattttgtaattcactaatcctattgcgggatctggccagcagcccgcaatgcaacggggctctctctttgttcctaggcggatcggcaggttgagaaataatagacacacacaagatagtgagagctgggtccaggggggtcaccacctctggtcccgtggtgccaacaatgcactggatataccagcatttatgattaagtttagtgagggcgggggtaggttagtgagggatttagggtcatttgattatgaggtgagatggtcacatggggatgaagtaattctttaacataacattttatgtagaagtacagtatacagagataagaatttacaatatagtgtgtgtgtcagtaatttctaacagagccttagaacagaaacacagtctttccataacctatgattagcaagatattaatcagcagtaacaattgcaacaaaagctggttacaaacaatccagggaaacaggacatgaagctagacaactggttagaccagaaattctcggaagggagtatgctttaaccctaaagagacctagaagagccgcggcaagatgagggcgtttatagccctatcttatccatatggacaggcgccccccatgcatccctttataggctttccacaagagtcacattccattcccagagctatgaacatctgcttttctgggataggaatcttggtgatgtgaaacctccctgactgcacttccactcataggctctctgtagggggaagcacatcacgcgctgttggctcgttctggcagtccaacctggaattgtctttacacaatcctgcgtgcaattttgtatttacaataatcagaagcatttcatcttttattccatagcaatagtttcagggggtctccctacgtctcccccttttctctgatttaaatgaaccatagcaatcatagcttggcgctgatcacaattggattgaagaatattttttccaattttacacatgaacaataaaccagtagcacaaattatacacagaacaaaattaacgatagtggatcctcccaaagattttacccattgaatggggttaagattagataacccctcagagataccgtctaaaacttcagcatcgggtaaagcaggtaagtgtgcttgagaggcctcaaaaatctgttcttttagcttgcttatgtctaaacttaaattatcttcacttccttgtaaatggcgttttactgattcccaattgtgaacagacttattatattgaaacggagttatacaaaaattagaagtattccaatcacattgcatttgtaatctatgttctaaactcatgattctatctcccatccatgtaacagtttgtcttagatcattaatttgattagtcaatttttgatcaatacttgactgagaattccacatccgagtagaatttttttgccatttatccacaaaatgaacagtttgaatagactgatgtaatgcaactccagcagtagcagcagtcgcagtaatagcaatgaagcccattattattgcaattaatgtaaaaataaatcatttactcgttttaagaattttctgtagaatattgttaataacatggatagaaggggaagattcccaaggcctgtgtaaggctacggggagccaaataccgtctctggctctgactattaaaatactatgatattgattaaaggatgagtcaatacaagtatacaagtaacaattaacacaggtaattatgttagtttttgaactaatatgcatctttcctactaataacatatatggtggtttaacacaacttttaagtggtatagttttgttggactccatatagatagtatacatattttgaggtgacaaggtggatttacttataacactttctccagcccaaactctcataccagtcatagctattgttaatctccataattctgaatgttcaggtcctaagtggggaacaatgagccttggctttggaggggcaacccctgcccctttccacttaagaggaaaaaaggagttaaatgtacaatataataggggagggttgtcactacttttttgataagtaatattatagagaaaatgttggcaatctttgtgaccttgagagcaatcattagtaatatgacctttgggagccaaatcaacaatggtgtagtgagaagaattaaataacacagttccttctgagctaacacaatctttccatattaatttgtcagcatttgaagacaagttgagaggacatgcaggtcctaaaggcttatattggaatgtgtgaatataatcagtgattcctgttttgatttgcctcagaggttttaatgagagccccgataccatgtgtcctaaaggagggacagagtgaccagacagtagtgtgacagcccaagtttgaatatctaatgagagacatccattagtgggtcccaggcacaaaggtcgatacctaaaacctaaagtgatattgaaaggggttccttcttctgaaggttggtcaggacaacgatcatctacagaaccaggcatccaaatactgtcattaacatagacctcgataggagcgtccatccctgtcatggcttgaataagaggaggaaaaggaatataggcccaatatgtatagtttttaacagtctgtggagtgacagagggtagaaggatcagtgtaaccaggaggaggcagaggttgagccggacctggatcgctggagacaagttgttcaggatgtctgactggattgtctgttgtaaaggagttagcgtggtcattttcttctttttgatgattgggtgtgttagttgtttcttgctgtggtgctttttcagcaaatttctctgtcttgttgttgcatgcattttcaggacacaattttaggtgtctagcaggaatccaaacaggagattgacgttcacctggggaaacacaagcataacctcttccccacgttaaaatagaaacttttgaccatatattagatctttccaccatacttctcttcctcggtttactgtaggatggttaccaaagaaatgtttttcggcagcagtaacagaactagatttaggaatattaagaaaatttaacgtgagcaatgccagtttagttgtatgtgaggggtagacaactccttatccccctctttttgtttaagtaattgtaattttgaagttctcttacttctttctacaatagcttggccttgtgggctctaaggaataccagtaatatgtttaatatgccactgatcaagcaaatttttaaaagctttactacaataggctggaccattgtctgtttcgagttcactaggaattcccatcaccacaaaacatgaaaacatatgttttttaacatgagacgtggcttctccggtttgacagggagcccagagaccccctggataagtggatgatggaatttatttagagaaacagaataagcgagagtgttctcggcagcttttgtcatgttttatcatagagattttcctttttgcaaagctagagacattcttgttttcccattcaactgcgcatatggaaggaattaggaaatagtgttacggacgcagtgtcgggcggggattttggtaacctgaagagcactcactccttctgaaaagaaagctgcttctggactccaggtctgtgttccagcgtggaaatgcagtctcacaggggccagatcttctgatgtttcaaaagaaatcagaaaactagattttaatgaagtcctccccaccttttgttcacaacacagcagaagccaatattcatccctcaggtggccagtttgcagtctctgatatagaccatcaccaaacaaatgataccttttataatgcctaatatcaatcatggacagctcacacagtaattctaaatatgcaaacttgcttgctgacttgcgcactcagcctgcaggtgtttcagtcactttaaatctaaacagattttattttctttttagagttctttagggcagcactgtccagtagaaagttctgcaatgatgggcatgttctaaatgtgtgcctttcagtccagtcgccaccagccacatgggactcttgagcattcgagatgtggctagtgtgactaaggaactggatcttaaattttatttaatctgaattaattaaaactttgtaaatcgtcacctgtagccagtggctagcaagccttatctgaaggtctctaccattctcatcccctcagaaacccagctcagagtcactgaatggaaccaaactaatgcatgcttttgattgcaaggcggagtaaggaggggagggaacagatccactccaaccttggttggggtcaggagaaaattccatgtacctaaatatatgaagcttataaatcaagctgacacactcttaaataaaatatgttcccatcctcctacctgtgaagtatttctttgtaatgtcctggaaggacaggttcaaatttagaattcctggactcctagggctctgccctggggcacagtggcatggggggagctggcccttctgtccccaccccggctctatcccgcaccacaactggtgtagcacacctgcctggacagagtggaactttacataactgcggttcaaggaccatctttgggacacttctgttgatcagatctcttttctccctcatggctgtagctgcatttgactttaagacaccttacacagccttgtagaaatgccatataaagtgaactcctgtattgatttgggcatgaagctcccttctgggacaagtgctatgtctgattgatgccttctgggagtccatataagcgcctacttcattgcctacaaattgaaggataatcacttttctaaacaggcttgcactgaattcttcagaggcaaattagaactgaacctggctgctgcctttaaggtgtgtaagacctgaaacaaggaatgggtacaggtgtgactttggtcaaaggttaataaggagatttcacttcattaagctgcttgtttcaccatcactaaatctctttggcaacctgcctcagaagacttcttacttgggacggtcctttatgtcaaaaaaattggggcgtagaagataaattacaggttgcttttaattcaggtataaatcaatccagtgagctccatgtgatgaaagtcattagttaaaaaatcaagtatcttaatgcttagaatttgcatctggattatcttcatctaaataaagcctttcaaatgatttgcaaattctggcattaaaataggtaaaagagaataaacataacagtcacactccatgcacacatagatgtatgtgaaaaacttgagcagtttgagttggagggcagcttctgaagcttattttgaacaactgattgatcacattcgtttctgctgggaggcatttacgcccgtatttttaacaggtgattaaaaagtcatttctccacttggagaaaaagctggagaactataccctgattgtgctggggctccctcctgtggtaaaaaagaagaacaggcacatacataattcctgacagctgaagaaaagaaatagatggtcccagggatagaaccggaaagggtaaactgtgacgatctgcaaagattcagggcatccggtcagctctctctgtaattcaggcttgtctgggaaacaaacttcaagctttctgttagatatgttagaccctggaacacactctgatctacaatggctgctaccctacttaagggcactcacattttaccactctctccttaatttcctttctattacagccacttttcagcgttagaaactcttttatgatttcgtagttcataataccttaatagaaattaatgtaaacattttacagatgaaatatgttttcccctgtgtctcttttcatatatgcaaatgcttagcaatcttgggtggttttagaaagtgatggtttctttttctcagtgccttgacctcatttttttctttttttttcctctgccaacatcaatttaagtctattgaaacagaaacctttgaaacagtattagaagctgaaagccatccctacatgctttatgactgttagactgagtgggtttgcttgagattaaatttgccttttttttttttttgacacggagtcttgctgtgttgcccaggctagagtgcaatgcatgatctcggctcactgcagcctctgcctcccaggttcaagcgattctcctgcctcagcttctcgagtagctgggattacaggtgaccgccaccacacctggcgaatatttttgtacttttagtagagacaggggtctcaccatgctgaccaggctggtctcaaactcctgacctcaagtgatctgcccaccttggcctcccaaagtgctgagattacaggcatgagccaccgcagccagcctgaagttaaatttgaaagtatcatcttgtccatgtgactcttttaaagggtctctaatcaccagcgcacgttgagctctcctagccctgctgcctgaattagctgcaactgtgaggctgagaaggagtgggtgaggctaaacatatccaatggccaggcaaaaatacataggtagtacaggaagataggactaggggttaaaactggtgttgggagagacaaagaaagataagcagttcacaacacttttcttgtttcttttatgagagaggggtggacaggtgtcattctgcagctatgggataagtaggagcctatgtctctgcattttctctaaattctatcctaaaggggagccctacattgtgatagtagggagtgggtgtcgcagtggccatagggagcttccaatctctagggactacctttttggaatggcaggtacacttttcgtgaatgcaggatgagcatttgaaaattttgaacaggcaaataatgaatacactgtgtagggaggtaatgatgtcttgttgggcttctcaaaaacatttcaaagatcttctaagggtacaataaaaatttcattaaaaagataaaatgcatttgctcataagaaaacactaaatgaaataggtattacttatatgcattttgtcttagcctatttaggctgctataacaaaatgaccataaactaggtagcttacaaacaaagaaacttatttctcccgattctggaggctggaaagtcccagatcaagtcactggcagatttgatgcctggaggacctgcttcctggttcctagatggtgccttctccctgtgtcctcacctgggggaagggcaagcaatctcccttagtcatgtttgataaaagtactaatcccgttcatgagggctcctctctcttgatcttgtcaccttctaaaaacaccacctcctaacaccatcgagctggggattaggtttcaacatacgaatgtggagggggccacaaacattctgacaatcgtgaaatttgtaaagggatttctttttcctttgtctttttcctttcacctttccatgttcagaagagtgggaatagccttccgctgagcattttacctgcttggtctcagacttttcactgttgtacctggatttttagttgttaggggtgtgtgggaagataggacctagggggtgcagaggaaaggactggctttccggatgtccacatcaggggtggggggcagggtctggttcggccacccaggctggtgtgcagtggcgcaatctcagctcagtgcaacctctgcctcctgggctcaagccatctgcccatctcagcctcctgagtaactgggactgcagacacacgccattacacaaagctaatttttttattttttgtagagatggagtttcaccgtgttgcctgggctggtctggaactcctgggctcaagcgatccacccgcctcagcttcctaaagtgctaggattataggcgtgagtcatcgtgcccagcctggatgtccacgttttttaatgaaggtatacgaactactattttatagaaaagtccaagttttttcctgcttctcactctccagaacttcctaactttcttgctgatggtttgtgaggccaggtatcagtgaggtgattgtaattcagtgtgttctgacaagatcaagctgaaaagtgtaacaattttgataataaaagtgccaaacaatttttcatatcactagaatcctggttgactcaacaggcagatgattattcagaaatccttcctcctagtcccttgttgtttccactaggttaacttatttgaaaaaaaaaagtccaaaatgccagtacactgtatgaacatttttcattgccgaaaaagcactgattctacatctgcttagatttgtgcagggccctgacacagacataaggatggtgcgcccccgtgattaatgtacttctagccttcagcttgccattcagccctgttgggagggtcaagggagatggcgcagacattgaggactgagccgaagcccccgtggggacaacaataaaaaccatccctggaatggagtgtcttgtgtgcaaaggcctggaggtattggtgagcacggtgacttgaggatactgcaaggagttctttgtgactgaagtataaggtactagcaggagcatggtgggagaggaaactttaaggaggtctttcatgaaggaccttaaataccatggagagtagtctcggttttaccttacagccagtaggttgccattcaagaattttagactgggcgcggtggctcaagcctgtaatcctagcacgatgggaggctgaggcaggtggatcacctgagctcaggagttcgagaccagcctgggcaacacggtgaagccctgtctctacgaaaatacaaaaaattagccaggcatggcagcgtgcacctgtaatcccagctgcttgggaggctgagacaggagaatcactcgaccctgggtggcggaagttgcactgagccatgatcgtgtcattgcactccagcctgggcaacaaagcaacactcctctcaaaaaaaaaaaaaaaaaaagaatttgatacaggaataacatgtttacaatctggctagatggtaagatacctaaaaataaacaataaaataaccagtggcatccaagaagtgtctgaagacaatgtatgattcaatgttaaatgcttaggacagtgttgagtgacagtcatagagaagataaattgctgtaagttgaggatgtcagggaactctttctgaaggaggaaagaataacgctgcaccttgcagaacaggtagaagaaagggagacgcttcattgatgctgcggtaggggatttcttgtgcacagatataaggctaatggaaaaaagcagacaatgctttttttcctggtcacactgcagtagatgttgccgcctcttcccatgagaggagaaggataagtgggcatggcccaaggtagagtcaaaacgatgtggctgagtgtttctagagaaaggacctcaggatgggatgatgaactgagaatccacgttaggcaatgttggcttattccagcttggggacaggtgttaaacactccagagtttcagagtattcacttactgaattcatgtaaccccttaaaggggtgtctagaacctactcaatgcaagcattgagctacatcttggccagatgtctctcatgtgggcacctaatttgcctgccatattggcttctctatcctaaaagactttttccagagggtgtgaaaatgtgtgtgtttttctgggactctgttgattcacagctactccttgatgccatcgagcctgataaatgccatggactcttctaagaaatcagaaccctaggccatcagcacaaattatattcctggggatgaatttgctctagaacaagtatttagctttgctggaggttattccagccctttctaggcctaaccatacaagaagatgtgaatttttcctttttgatgagaggaaaagcagtaaaaaaaggaacccaacccaagcctggaacaaatcaggctccaagcaaaaggaattctaccaatttgtgggactttgccaacatttccaacagtaatgggaaatcaatgtattaactcagctagtaaatattctagagtggaatagatgctgcctggaggatgcagatttgaacaaaagaagcatggcacctgccctcctgcaatttacaggtggcgaaggaaaggcaagtaaacaatttggcaatcaacagatgtttttgcttatgtgtactattattctaaagagtcctgtctgagctttggatgaggttcagctgctgctgtgtgccagctgtgtgattgaattcttctgagataaatttttaaacgataaaacgtggccaaagtgcaggaaaagcaaagagccccgtggtttcatataagtgagcagcacaggctagatttaaagcatctgagaagccatggtccctgcatttgaagaactttgattatactcttcaagctaaagctgtgcaccttacactgccttgatgagtaaagaacttttctttccacctgttcagatttgacagcgctacgccacaggatttagtctggacttagcaaacacccaccgatgaccgagctgctgtaaccatggagtgctcgtcagcattgcccctcttcgctcgtctttgtctaggcaggattctcctttactctgattggaattgcagccgtttctgctcaggttggaggtgtgtggacaccagcacggtgcctgcctcccctgggtcagcttgagatcttgctatcatttcattccacaaggaacacaactcctctcagattaaaaggaaaagagggagaaacataattaaacatagcagtccccagtgcttgcttaaatgctaaatgaggggcctatgtttttaagagcacattctaggggaaattctgaaattgcaagctgcagccctttctctcttcgtgctcagtttggctgatttccaaagcattgaggccagcaattgagggactgaaatgtaatcggtggtgatacgtttgtgccacatgaaacattctctgcctctgaaggctccagaggctgtgggaagcagcacatcagcgacagctcctggctgctggactccgcagggagggaaggaagattggtcgcaatggtaagaaactctggagttttctacagacctagtgtgttacctgggaaagaattcttagcctctgctggtgaaaatggctgttggtagcatgagactgaacagtcacttgagctctgaggcactgtcctttttttatgagaagggcaggaacactcttttcaccagagcactgattttttgaaaaatgattcctttcatgtcagaggtaatggtgctttgtaatttataaggacttcgctgggctctgccagggaaggacagtcctacggtgacctcagatgtaaaccccgattaatgcattctctgaagtgtgctctttcctctgaaagtaactgtaatttccatgagattcttcaaagaaatagttgtctgttttctcgatatgtttgtgtggcggtaaaaatccattcatccttaagcagcttgctttgaattgtcaccgttctgtgagcttcactgtttactggaggcattaagcattactagagcaaacttccacgtgattttttttttcttttgaaactatcataggcagtaacaacaggagcccaagttttcaaagaaagaacgatctgactttggaggaagtttgattcaatccagtaaagcaaacattgccaggatgaggtgatccttaacgtaaacgtgaggtctttagatgaggttttagaattcactgtggaagttacaacatgtttatctcttggcctctgctctctggatgtcttttccaagtgtctcctcccaatcacccatgatacaaggaggaaaacacgggagatggggggaagaactggcttgcaacaatggggccactaaacattttctcgaaaggattaatggacaaaggacattgataataaataggattacatatcattgagaagaagataaagcctattactgttgagagagaatgcctgaaatatacttatttgactgcacagctgatgtgtgggaaatgatttttctgtttataatccagatgaatgaagagactggtgatgaagggagggttgggaatttttagaagtgagtttgcctttccagcaactcagaaagagggaaattggaaaccagatctatgagaatcattcatctcattccctgccttcatgcaccatccctagatcattcattcatagggacacagaccagagaaatcactgccaagacaaaggtcagatttttccctctttaggtgacacctggtaccttttatcatctcatccatttgagcagttcttaactgttgagaagtcaaaataaactgtttctccttagtcaggatgggtaaaaataaataaataaataaataaataatgcacatatctagcatgaggattaaatgggactctgagtgcttcggaatgttttgcctgaatgcttgaggcagaatcattcctttcttcccttcattagcctgagaacattcctttaaggattataaaggaccgggctgaaatgcagagtccctctcgcgccagcatactttgagcatgggcataaacatacgcatagtgatattctcttacagtattcagggagaaatgaggagcaggtcaggggctgagatcattgaagtacaatctgatgaaagtgtacagacctccgaagagagtgaactttcctttggagttgtggaagggtgcgatgggaactaagagtgactgcaagctgtttacattcaggccatcctctggttattttcattaagtactgtttaaaaggttggggaaaaagtacccagttttacattaaaataaaagctttgttctaagtgagctcttcttaatgacagacactaaaatggcaataatttaacagggaccacctagcttttgcctaggcaaccatatttcacctttcattttagtgagtaagagaccactgaccggaagaggagtgaatctatagattggattttcattaaatcctttccatgatgaaaaggaaaccaatcatgtttctcatcattgcaaatgtgatcagttttcttacccaggatcaaagacactcactgtttaaaacactctccttgacctcattagagtcaggagcgtgtcagaacttgctagatgttataccaaataagccagcccagcttgggctctggcctctgattactttttaaattttatttacaaatttaaaggaaatgcaaataattaagttcatattacaaattgcagacgacttttaagttatttcaaagtgaggaaaatgtgtagaagttctcaatattttacaaatagcgaggacataatgtgctatgtgctgagtgttttaaaccctttagtaatccccattcttgcttttaaatacatattttaaaatgactacccctgttgcattgaggaaaggcacacagagttctgtgctttctgaagggcacacagctagtgaggggtaatgccagggtgggaataaatggctactggctctagggccctcattcctgaaaccacctcctcatatagcctttcaaagtagagaggaagagagcaggcgctagatgggtgcctgacaacaagttacagaaactttcagtgccccagcctcgaaatttcaactcacctttgacatttctcttttcctgttcttccttcccgatgtcacctgttttagttgctttgtcatttgctcacgaacaccttatgttcctactctgaccaatttcccttaaacagctgtgtctaactgggagacggtccaatgtgtggaaagaggatataaagttgctcagacagggagttaaatttcttttttctttttagatagaatctcattccgtcactcaggccacccaggctgaagtgcagtggcgcgatctcagctcactgcaacctccacgtctaaggttcaagtgattctcatgtctcagcctcctgagtagccgggactgcaggcatgcaccaccacacccagctgatttttgtatttttcagtagagacagggttttaccatgttggtcagattggcctcgaactcctggcctcaagtgatctgcctgtctcagcctcccaaagtgctgggattacaggcatgagtcaccacatccaggttctttatttttcttaattttattattattttattttatttttattattttattaatttgtattggtataaatgtatgaggtataagtataattttgttatatgcatagattgcatagtggtgaagtcagggagggagttaaatttctatgttacactcattgtgtgattttggacagtaattttaaaacctttttaattcttagctttcttctctggaaaatgggaataatgattgttacctccattgggtcatcgtgaagattacattaatatatttgtgtaaaatagaatgtttaattaggagaccatgacaaggagaaaaattagaaggaagctttaaaaattatctaggtaaaagatgatatggatttaaattagaatggtagagagaaaatggaaaataaagcaggagatgatgtgaaagaaaatccacctgccctggccactgattggaggtgaaatgtggaagagtaaagcaaatgaccctggcatttgaagcaagcagcttgaaaaaaaaaaaaaaaagaagtgaataaaaccccctcactgtaattcttacattacctggcatgccacctgtcttagtctgttcaggctgctctaacaaaatacatcagactggataacagaaaagcaacagaaatttgccaggcgcggtggctcatgcctgtaatctcagcactttgggaggccgaggcgggtggatggcctgaggtcaggagtttgagaccagcctggccaacatggtgaaaccccgtctctaataaaaatacaaaaattagctcagtgtggtggtgggcacctgtaatcacagctactcgggaggctgaggcaggagaatcacttgaacccaggaggcagaggttgcagtgaactgagattgtaccactgcactccagcctggaggacagagcaagactctgtctcaaaaagcaaacaaacaaacaacagaaattaattccttatagagactgggaaatccaagatcagggttttagcagatttggtgtctggtgagggccaactctctgcttaatagatgatgccttctcgctgtgtgttcacacagtagaatgagctcgatagctctctggtgtctcttttataagggcactaatctgattagtgatggcggagccttcaagacctcatcaccttccacatgccctaccttctaatactatcacactggggattagggttcaacaaatgagtttgggaggtgggagaaacaaatattcacaccacagcagtgcctttcacatagtaggttttatatggtgttgaatgaataaaggcataacttaagagaaaagctgagggtctatatagtagagcatataacacatagctatatgtgacttatgttatctattggactttgagtaacaggctataggtctcatctctttaatatatatcacatgtcaataactgtatgagatgagtcctatggcctgttcccaaagtccaatgaggtgtttagaagtgagtgacaatgtggtgtgtcctaggagaaatatatattatatatatagcctactttatacaaataatatatatattattttattatataatataatatttatattatatataattattataatatataataaaatataattacatatataatatataattatataatataatataaatatttatattatgtatagtataattaaatatttatattttatataaatatataatatatatattatttgtataaagtaggcttttgattatgttcctgaggagaagatggatctagaggatcagaggaggttacatgcacctatattcctatgtccacaggtttcagaagcttgaaggtaatgagtgaggacaaattagatatagttagaaattactaatggctacagtgccattttcttgatcattgataacctgtaaccacattgatcaaatgaatagaaatatgtggaggagaatgagtgcatacaaaatacctccctcttctccggtacttgaaaactaaagcacatagaataaaggtatgagtgattttattaatagggtggatctaagatgctatttattggaaaaagaagtattgtggtgacaagtttttgggaaattgaatgtgttggttggctttgagtttctccttgaagatggtgtcaagagcattagaaattatgaattacacataccaacaatataatgaagatgagtaatctcattcattttgctgtggtcttataggaaggaattactcttgatgggctacaggaagtgcaaagcttaaaataagcaaatatgagttctgttcaaatttttatcctattgttgagcctcctggatactgatgattcatgatggatgctgcacaggtcccattaggtgagaagacacagaagccaccatacatgggatgctagagaaaataccattgatgtggtggcctattaagtctgatgttgatggtaaaatcaatgcaataaatggaagtcctaggataaataagctaattagctgcattgcctagaaattaaataggtttgagatggaggaagtctctggagagatgctcataggattacaaaagaagtggtgtggttcatgttgatagccttgactgcaactttaaatgccctcctataaatgtggactcaagaataatagcaaaactttcttaggtgcttcaggttaagctatgatacagtttacgttcactcttccttcctttccatttacttgtttcaacactcctcattcattactttttgcctttgtacttcatctctaacttcccatcttactccttggatttagccatccaaggagtaggtggataatcttcccagttcacatcctggacacctaaggactcagctctgggcatctgcttactggctctatgaagtgcccagactccctaagacccaccaaccagttcaccttccttgatgtggccctccctgtattacacatagatataaggagagcatatctatttggagaaatttgttgtttgcattctgaaatttgccatgtttggatttatagcttgtgttgcaaaagtgcttgattaatttcctcttttattttaccactgtgcttattttgttttcaatagtaaaaacaaaatataaaatatatttaatatataaaagtgtcttaagagatagataaaatacctgatagggaaaaggggggaatcacatctgtatatacttaaatctcactttttaactaacttcagccttgtccataggatttaatatttctggtggacactttggctgatttaataagttcatagaatgtatagcttgttagcttacatgttctgtcatagcaagggcaggctatattgcaatgttgctacacctaggacttccccagtttttgttgattcggcatggagattccttgcagaactgtgtttacgacttaagtttaaaatcactgatggataaggaatacccgtttatccaatctaggacttagaagaactgcctctcaaatttgtgtgaaagtgcatgaacaaataacggattaatttcttaagatactgaaaattaaatactgcatacaaattgactttactagtttaggattataagtgtttcctttccctgcgtctcttctttgtatggagtgtcgatttacttaatcgggtttttaagttaaaaaactttaagataacataaaaactgaaaaagtgcacaaatcatagatgtacagctcacatttttgcaaaatgaacacaatcttgtaattagcaccccgctcaaagaataaaacatcactggttccccaagccatcatgtggcgtctcatgatcctgatttagaattcctaatcaagatctgcttatttttaagctttaaatacccttctttattttttgttttaaaaaagaagcgaataatcccatttatgtaacagtgccgccatggataaagtggacgtaatacctggatgctgcacgtagatggaaatcttgaggcacatgctcaccacactactagcagtggcggaatttgagagatgttttagaacttctcagttgtttttattcttatttaaatagagtttttcatgacaatgagtatgtgaagtttacaaaaaaacatataagcattttttaaggaactctggtactttagaatgtctttggacatgcctttggaatgtctcatgatgggcatcggccaaggtattttttaaatcactgggcaaccgagtccatgccctagacactttgtgccctttgtggggaagagttctgtgctcccatgagaggtgctcttaagttgtcagcgagaggtggcagagagaatgcttcactctttgctttatacagaagcttacagctgagctactcaatgtactggaaacagctgcaaatagcagagataaattatcaatagcaaagattaaaaatatgtcagttaactttctgtttatctttgtaaggaataagtttaatcagaaataacgtaatagcctttctgggtcttccacattgagatataactgatgcttcaactttggcagaggatccattttgaagagttgccaagtacaatggtgagacctcttgggctctcgcagaaggtgggctcggtggctcccctgcctaggatggcccactgtgttcctcgggaagaggggtgtctgtctgactccttttccccaaagctttctattactgttactttaaaatgtgcaaaagtaatatatatccttatgcactctaaagtcaggaaatataaattcttatttcatcttaagggaagatgaaaaagggctgataactctaaatctgacttataactgaggaaactaagacaagcttagtaagccaaattaatttttttttaaagtttttttctgactactaaagaaacacatggtaatttcggaagattcataacatggtgaaaagaaaagtgaaataatttagggctaataactgttggttttatatagagatatttataatctagcctttttcatacacacacacaacaccacacacacctactaaaaacataccatacacagcatttttactaatggcagtaggttaaatctttcatcaattatatactcatagtatcctgcattttgcttcatagcacttactactattttaaattatgttatcatttatactagcatcctattatactcttgatggctagcaccatgcatggcacattacatatttgttgaaacaaacagtgaatattatacattctgcctagtcctgattttttcaacttaatttattatagctattgttccataccaataaatacaactcacataaatgtaactcatcattataatggacatggatgcttttccaattttccttccaaattactatttataataatgctgaatgggcatctttgtacatgcaaatttaagcaatcacccaatccagttctctttgtatttcatccatacagtgtcaagggggtgaatgacctgattttagaagtgtgaaggaaagtaatggacagagcagtaggaggaggcggagtgagggagagggagcaatgagtggtttcagaaaaaacatagtgttctgtgctcagcatgtggattgtgtttagtctgtgagttaagaaggctggaagaggaggaagagaagtctgtggatgagtctctcaaggtagcaggtgtcttgtatctcagatcccttttagctaaaatctctgtgattctggggctgggccctttgcagggcaaggacactctatacaattttgctcttcatatggtccacttggccctcataattggttaactgcattagatgttgataaatggattataatctatacccgatcagttttcaatacagtcagactcatgtgaatcatgctcagtctttaattattctgcatcaagcactgatgatttaggaactacacttaggtggggtgtagcctgcaccacccagcattctaaggggtcattccaaccccacaactcagaacaacattgtcggctggtcccaattaattcctgtgaccagcaaccaactttcaagctcctacatgcttggcgaaaccaaaccttattcccttccaccggggtgactcgaaatcatgctactgcctaaaaatggatgaatagaaatatctatctgaaaaaaactaaaattccttttattaaggattgtttcaagtaattgtctagtttatctcagattaagctatatcctgtaactccttctgcctgccaatatcttaggacaggagctccatttatcccctattctatgtgttaagtgtttccaattattatgtatggtgatatttaaaggattgaaatatatacaagaacacccaacactgggctcagcacccaggaggtatttagtacctaactgtaatttggagtttcccaaactgaaccttggccagtggagaactttccactgcttgtggcttatactgtccctgtttctctttctcttaatacttgtggatcaggagagttttgttttgtttcgtttccttctcacacatttatttagcacttattgcaggtgtgacccttattctgggaaactggagtttaacaaaaagctcctgagttcatggagttttcaatccagaggaagatgagacaaatgcattcgtttatacctgcagtccgtagtgtgcttcacggaaaattggatggccagatagagcagccatttctgcagaaagtcatcatctctcaacttgatggtaaacccctttctttcttcctctctggcttccctcacatttattctccagtagatatttatggaccgctagctgctcaccagattctatgcccttctctttttcctggacacatggctaatcttcattttcccgctagtgcctgagatcaggccaactacatgtaggcagaagtgatgtgggctccttccaggcctacccataaaaacttcctatgaacgtgcctccatgcctttttcccattctgctggatgaatgggaaaccctgaatggccaaggttacttggaagccatgagttgaagatggcaaagataaccatcagcctcggtctccgaatgaccttgttgaacaaagcccccttccccggctccttccccacatgcaattgacttggactctacgtgaacaagaaacaaactttgcttgtctttgagccattctacattttgatctatttgttaagcagtgagtgaggtaccttaattttgtcaagtccctggtagctcttaagcgctatgccaggtggtggggatacagtggcaatccaggaactaaaaataaacatgtaaacaaacatgagggaactaaacaataagcatgtaaagaaaacagaaatatacatattgagataagtgcaatgaaaggaattaacagggtgataagagtaacaagctggggaaggggcagctggctgtgaactaggctttgaataaagcataggttttgactcctaaacagggattgttggttaaactctgaaagtaggaaactaattatcaattaaaggaggatacaggaaaattgcagaaacctaggacagcaccctgactccccttctaaacctgttccaaaatactacttctgcaaatggttaaaaattccaaaaggccgggtgcggtggctcacgcctgtaatcccaacactttgggagggacgaggtcaggagttcgagaccaacctggccaacatggagaaacccccgtctctactaaaaatacaaaaattagctgggcgtggtgatgcgtgccggtaatctgagtactcaggaggctgaggtaggagagtcgcttgaacccaggaggcagaggttgcagtgagccaagattgcaccattacactccaacctgggtgacaagagtgaaactccatctcaaaaaaaaaaaaaaagaaaaaagaaaaaaaattagccaggcatggcagctcaggcctgtagtcccagctatttgggagactgaggcaggagaattgcttgaacccgggaggcagaggttgcagtgagccaagattgcaccgctgcactccagccagggcaacagagagagactccatctcaaaaaaaaaaaaaaaaatttttttttctaatgtgcaagcaaccatacatgctgtcacgccatccctgactacagattacccccagtggacctcatataccttgtgcatccagaggagagtttagggacttttaaaaagttacttgttagtatcaggcaccataatcaaggatatctatgaataccccaaaactcttgcaaccctcttcactattttgcaaccaatggaataaatgataacttagactcccataaaggtaaaaaatgggaagggtagaaacaagtgcaaatttttaaaatgaaaggaagaggtaatacttctctacgatagcaccatttgttgcttaacaactccggatcttatacagtagcacagtgatgacagcatgcacttggctctgccaagcactttgtgtgatgtgatcttgggcccgtttcttaacttctctatgcctcagtttgtttataatcatagctagttcaaagggtgacatgagaattaaatgagttaatatttatgaaacacttaggatattgatgaagctgacacatagtaagtacttattagctgtttgtaaactaaattttttttttttgagacgtaaacttgctgtgttgcccaggctggagtacagtggctgaatctgcaactctgcctcccaggttcaagtgattctcctacctcagccaccctagtagctgggattacaggcgcacaccaccacacctggctaatttttgtgtttttagtagagacagggtttttccatgttggccaggctggtcttgaactcctgacctcaggtgatccgcccatctcggcttcccaaagtgctgggattacaggtgtgagccaccatgcccagcctgtaaactaaattcttacagaccagagctaggagggtaaaggatgagaatgagtgaaccgcagggcatcacttctttggcaggcggtcggtgccattgtcataaagtctgttggtcactttgtaggccctaaagagaggcatgtgtgggacatgccaatataataccgatccacctcagttactttcgatttaaatgtgtgtgatttgtgccatcactggtatccctccagtgccagctaattgtgctatttttaagcacagaattttgaaacagtagagttcttacagatcatcttgtacctccccttcctgaggatacttaggtcccagaaggtgaagtgactaatcgagatcacatataaacctctgacaaaggggttcaactttcaggactcctggtttggtgccctgataccccattctcccttgctttgtctaaccatacgttgtctgatggtttagcctcataatccaaatccataattccaagaggcttctttttgttcttttaaatttctagactaacttttagaaaatgtcttagaataaatattaaatgtaatagaaatatttgcttacgtggtagtgggtagaacgtggtgcaacctcttgatggtctaaactgtaagatttttgtttttcataagttacacactaaggcagtgacaagacacattgccaactagaacttaaagcaaatggcacatgagcttgtatccaaatccttaaccccttaaggtgagtgtattctaaaaacttagctcgataaacatcaaatctctttataattagcttatatgtataggctgattgtcttcagttgtacttttttgtctgtgtcctttggataaaaagctgtctgggtctgtggatttgagctattgtctttaataattaacatagttgtgttgtaaagataaatttttttttaaaaggtgaattctaagaacaattacatattaaaacagttgctcacggagatcttgatataaaatgaccctaccagttaaacatttatgacaggcatgtggactctggaggcaaggagatgaaaattgcaattctgaatggattttttaacagggcaaaaagaatgatgtgattgcctttccaagtggaatgaatgccatttagatgattagaggatgaaaaataagacctacgaaagaaatgttaaagtaaatgggattattttattttggaaatggagaagcatagagtgatttaatatgcatttgagtgtctgaaggattgttacaccagaagctggtgaccaacaagtttccattactaccgtgaacagaaagagggggtggggtttcatttgcactggggatttgggtaagacacaagaatacttttctgatagggaaggctattggatactctaatgggttttgaaagttgtcggatattttttgaggatccactgtgtgcaggtcattgcacttgtgaatggagtttttttctttctctactactttttataagtcagaggcttacctttctgggttggtttctgtgaggttctacttgaaggcatagagtagtggtagatgatttatctaaagtaattttaatcttatgcttcccatgtcaaaggtagaaaagaactaaaagtaagtacattctcattacctctagcagttacattccataaagtcactatgatcactgaattagtggatgctcacccattgctcttttaggaaatacaaggctaggcttctccaagcctctggtcacaacatttttttcagctggtcaatacataaccttgttttatgtgtgtttctgtttaaagacactttatttgatatgtattgttgattcattaacactgaactcacagccaacagtgctataacttaggcctgaacaaagcttatctaaaacacatgttttctccataaggcacatcacagcctcctggcatttaggaacactatacacacttcaatgctacacctggggggcattttaaacagtataattaccaacaaaaaacacacagatgctaaggccttgtggttttagcattctaatagatcacaaaaagattatggcagccaagctgaaacgagagagcagagtgtcaccttgtttgacctcaactgggagcgcatgcactagggactcagatttttcaccactctgcacatgattgcaaatgaccatcaaagcccttgtgagtatcaattttagggtaacaaaaaattttggcaagtaggtgaattcgcaaataggaaatccatgaatactttggattgactaactgtactgtgtgttcagactttttgtcaaagcagttatcttcatttcaatttaatatgaacagcttactgtgcagctgtttaaaaaaaaaacaagggctggggagtgaggaggggagagcatcaggaaaaatagctaatgcatacgggcttaatacttaggtgatgggttgatagatgctgcaaaccaccatggtaaatgtttacctatgtaacaaacctgcacatcttcacatgtaccctgaactttaataagtaaaattaaattggaaggccaaggtgggcagatcacgaggtcaggagatcaagaccatcctggctaaaatggtgaaaccccgtctctactaaacatacaaaaaattagctgggtgtggtggcgggtgcctgtagtcccagctacttgggaggctgaggcaggagaatgacgtgaagctgggaggcggagcttgcagtgagccgagattgcaccactacactctagcctgggtgacacagtgagactccatctcaaaaaataaataaataaataaaataaaacaagggatgtctcaatagaccatagataacatatgacaatgaattcatgtctcagaacaccatctatacgatgacagctcctacataggtatccccctccccagcatcttcattgcttcctgactcctgtatctatagcctccttggcatttccagttggaactctgctaggcatatcaaacccaccttgtctaaaacaatgtcttgatcacctctcctgtcccaggcttgcttttcccatttcagtaaataacaactctctcttttcagtagctcaggctagaaagcaaagtcttctcggctcttctcttccactcctgacatgcagtccatcagcaattcttggcagcccaacattcatgaggtatccagaaactgaccgccatccaccatttctaccgacgctggtccatgccagcatcaccttctgcctacactatggtaactgtgtcctgatgggtctccttgtttccagccttgctgcctgcagcttcttagcatagcggtcagaatgatcagtcttctgaaaggtatatcttgtagatccctcctccactcttgacttactagcagctttccatcttactcagagtaaaagccaaatgttggaccagaggctacaagagcgtatgtaatctgccttcctcctcattctctgacctcattttctgtcagtctcccttacttactccatggcagtcatggtgacctcctgctcctcagtagtgacaatcacacgctggtctcaggacctctgcatgtgctcttccttctgtctgggcgattcccctctgatagctgcatgatcttgtcttgaggccactactgaaacgtcctcacataaagcaagcttccccctccccataccctgctttaagtttttagaataatacatattaccatcggacatagtacatatttattggaccctgatttgtcctgtgatcccctctactaagcattagcttctccagaacaaagacattagtttgttcactgctgtgccaaatgtctgggtcaatgcgttgctcatagtgggtattcgataaatatttattgaatgaatgaataaatagatgaataactacagaacaatatcctcaatatattaagtggaaaaaataaggtgcgaaacaatatgtttagattgctgtatttgcataaaaagggagccagcacaaacatgtctatttctctatcctaagattaaatgagttcccaggattgtacaaaagcctggcaggaatggctgtcctgagaggagaattctttcaagggtgagacagagacacctacttttcactatatatttaatacttgtgtggtttttgcaatgtgcatggaacatcttcccccaaaacaaaccaactgaacaattttaagaaaattttacttgaaaaccctctattgagccttgttgaacataagctatgtttatgaaagaatcagaacttcaggggaccagaatgtattgccccattcctgcagaatacaggctctcagacagttcctttttgctttttttcccctctacggttttgtgtattttcaatagcttctctttattataagaaaacagggttgacatttttgggtcattgtgctccttgccatctgccacagaaactttgacatgggaacgagagaggcaccatgtcaagctggcaggattctgagggtgattttaaatccgaaaaattccatctctgtatctcttggtctcattttaaatggccacattttcctgtgaaagtctgccttttgtctctttggctttttttttctttttgtttttcttcctgtagcttttcccctgtggttttccatttggccttcccacatcacaaatctaattgggaaaaatggacaaaaatgcccaagagggtggcgatggtgcctacccatgtgacctccaacactctacagcctcctaggctttatgccaggggagtcttccagggcttgtcttggataaagaggagaatttcatttgctcctgtgtggttgtacttaaacccgtgtgtcttgtggataaaggtctcagaaatctgtcagtggctttaagccccagctttagacgacagatttctaaagacacaccttccatttatgagcattgagcagggacagagaccacacagaggtgtgaatgaaggcccctcccatattacagtgtggtccattagacttcacaaggagtgtcccctacgttggcagcctcgcctgtagccttgtctaagctcgttttctcctttgatttccaataggaatgaatagcttccttctaatattttatccttggtagtgtccgaatttcctattgatgctattccgtgtccttcttcctatcctacccagtagtttctggagtcttggtgaaaagtgtaaaagaaaacaaaaatatgctgtaaaaataagtactgtaattgcccatagttcattatacacagtaaatgggtgcccagtaaaactttatcagtcacaatgcagcactaattagaacatgtagttttatcactttcatcattccatgaaccaccgcccctgacttccactaccgttgtgccccctttcctgtggctggtgatgctggatgatgtcactttagcttgtgggtgagcagaacaggtggcttctcagattcccttgtaggattcctgtgactgtcattgacttacctcttacggtaggattaggatacttaagtgaacaacagtgcagagaccttctctaactttataatcttcttacacagttatgacttagtggcctaattttctctggcacagagtaaaaacagagtacttaggacatctggttttctagagcttttggagtcagagttaacacagatgaagggacagtggttctctccaaaataaccagatgcttgactattcacatatatgtgacttaaatttctattaccttgtttacacaattaaatctggcaggtgacagagttgaaaaatgttattgctcttcctgttgtatttgtttccccttaaagtagttaaaagaagatgtgtaaataagccgtggatgagaaatatagcaggatcatggtgtaccaagagcaagcgtcacatgcaccacatattttatcgtttgagaggcaagcgagagtgaaataggaagagcttaggcagaatgatgtggatgatagtaattaaatctatcatgtggaaccgattcatctcttatcctcagtcgctagaaaagattatccatggtggccttttttatcctttaaaagagatcatgttgaccaagcaccttaacagatatctgtgttctttaaagcctctgggttgacccaggcttattttatgcagcaagttttacaccaaaactgtttctttgaagaaagggggaaatggagaattattgttcaatgcatgcagagttccagttttgcatgacaaaatgagttctgggtgggagtgatggttatgcaacagcgtgaatgttcttaatgacactaaattgtacacttagaaacagttaaaatggtatattttatgttacgtgtatttcaccacgatttttcacctgaggcttggacatgaggcatgtggtcagcttcagggaagacaaggccagaggagatgctgggttcaggaatacttcctgcctcccgaagcagacaggtgatgaaaactaaacgttgacagaactcgagatgctcactcaggaggcgctgcaggacaggcgtggggcatggtgcttgtgcatccagacatgttcagacttcatctagccctgatgcttgcatagagctcaatgatgaggagcctaccattaaactcaaagctgtgagctagcaagttagacatgtgcctgtgagtgatgtctgctcccaattgagggttgggctgcagtcagaggaggagaaccagcaggtagaagggagggctttgggtcctgggcagtttaggacagggacttcattgttggaagggacagatagccaacatagggaaaccagcccaccactaggagtaggagtaaggggtggatggcaagcacatgggctattcatgctcacttctgggtgttatggatggaatgtgtgtgtccaccaagaatatatatactgaaaccctaagcttggtgtgatgctctttggaggtgtgtcctttgagaggtaattagctttagatgatgtcatgagggtggggcccccaagatgggattagtgctcttacaagaggaggaagagagaccagagctctttttctctctgccatggattcactgaggacttactgagaaggtggccctttgcaagcccagaagtgggccctcactgaggaaccagaccagtcagctccctgatcttgaacttcccagcctccagaactatgagaaataaatttctgttgtttaagccagtcagtctatggtactttgttatgacaacccaaacagactgagacactgagatgctatgtgctaggcccgacatccatgcaggagcttgaggaaattacatggaattctagtggtgttttgggattcctggccccttaaagactcgtggagcctaaggtggcaaagaggccactaaaaaatgtctatgcagcttggcctgatgcatggctaatgctttccgtggtcaagctagacagtagaataattttgtatgtctgtgttgggggggcatgagttggctacaaaaaaatgacctaaaaatgaattctgagttttccctaggaagaaaattacatttgtatcatagatattttcgtttcttattgcatctataaattttatttgcttgaaggaggagtagagtcaatgaacgttataatccataaattcaggtttctccttttactttatggccagattctcatggtgatttaaacccacagaaggagtgattagtcttgaatacagaaaggaagcaatgatttagatgccactgggaatgtactcatgataagaagtaaaaatggtaatcagtcagaaagccaattaaaatatttcatgcagttttcctgggttgttatggatagctgcagccatgttgataaatgcataaagagcatttccaagcccgggtgttgtggctcatgcctgtaatcccagcactttgggaggctgaggcaggagaatcacttaaggcctggagttcgagaccagcctttgcaacatggcaggaccttgtctctaaaaaaagtattaaaaattaaaaaaaattttaaaaagattatttctattgttaattacagtccccacaattaaacttaggttgctaatttgctttcttgtggtttaaattattcccggtaagcttgcattcttgctcctgagttaaatgcacaagtgttttgccaaactgaagttaaattgctctttggcagatgttaaagttggaccaacatccagggaaattctgtttggctttgagggttattggaactttttcaagatcaagctttccttttcatttcaatattattcgtggcattccgatttctcatcagatgactttttcgtggtcattcaactttgaactgtagctcgctgttcacagaaccatggcatcatgaggcttgaagggactgtgaaatgtcatccagcctgacagggccacatccatctttagaggagatggacggtctgtgcctgagacagagctgagaacctttgcctggaagcctcaacattcatcaccgagggcaatgactgctgaccctaactaaaggaacaattttgtgatttctttgtcatgcttaaatatttttccatttgtttcactagagtaaatttttatcatcgtgatttcttcccttcttgttcctttatctcctgtgctgtttcttctaaccataaaatcagtacaattaagggttggttctacaaggtttttttttcttcttcttctttggtatagaattacaatatgagattacaaagtactgaaaaaaatatagggtagggagctttgggttatggaagcagctgcttaggttaactgtgacatttgatgaatagataacctgcagctgggagctgagctaattgaggtcatgcattatgctcgtgaatttgaaagataacctgacattttgcaaagacaggagacttgtctggttagccagtttaaggagtttctacagcagggctgaagttcccatcccttttttcaacaactgttcactggtaactctgtacctagtaaaacaatttctgttttagaataaatattggaagggtggttgagctctttttctagccagaggataaatatttcctcatatagaacaaaactgtgagactctacaattggattataagccaaggcagttgaaggcaaaataggaagtgattttggcttttgtttctctcatccaccagatttcagtgaagtgtattttcatttattttaaacgctcactgtatcaaagagtctaaaatagttgtttcttggaggaggtttcagcatacctacttttccctaacagtctgttagaattcagtgtgcttgcttaaaatgaagacaataagtggatagaaaaaataacacaggagtgtatttggaagtttctggaaattctctagggtgaaacttccaccattttagctcttaagctcataagggaatcagctctgtttcagtctggttacaatttttttaacctccctggtcctaccatctctacagctcatatttttgctatgtagaccagagaaacactatttatcaagaacattgaagaaattctgttaatcatatctgactattaaaatgggggaaaagaatggggaaaaagacagctgtctttgcaagcacacatccgtttctggtgtgcagtggcagttaaagtcatctttcaaaggctctctgctgtctgttggtgccagtaggcaagataaaacaattttgtcagctaatcatcagtctgctccagatgatgcacagactggtctaagaataaatacgttaaaaaggaaagcaattagctttccatatgggatggcggagtttctgctttgtaaaatttccaagagtttaagacctgctgattcaaaagtattaagatgaactagaaagcttttcacgttcccatctgccaccattgtgcttttcactgttcctagatttaacatgatattaaattgaatcatggtagaacaaacctttacaagacttgatgcttgttaatatatctgacacacaataatgtagataggttggaagacatgatgcaactcctgatgaaaatataaagaaatgcaccaaggtgacaatattatttggttatattaataattttgttattagtaaaatattactgttgatatcttctggagttactctagaaactttctacagtatccttgagacttttgatcccccaaatgaatgacataatatactgataataacaattctaattcctaattatgtgttgatcaaggtaattctagctgttgtgacatataaaactcaaaatatcagtgagtttataaaatagacgtttatttcttgctcagataaagtttgagatgagttttcttgattggaaagtggcttttctctaagtggtgattcaggaacttaggctccttccatctttggctttgtgtccttcaatgtgttgcttccaaggtgcttactaccttcagcaagccaatctgtggatgggtaaaaagcatggtgggttgggcatggaaaagttcttactggctaggcctggtggtggcgcacatcacttctgctcacatgccattggctggaactctggcatataactacccagaaggctgggaaatgcagcctaacaatgttcccaagaaaaagaaatagatttggtcaacaattagtctctgccccaatgatctaagaatagatttgtgtaagctataaaaatgtacttcttaattattgcttatattgcatttcctgttttaagctgaggagatttgcctcacatatatacttacagtcataccccacataacaatgtttgggtcagtgacagagcacatgtatgatatcagtcccgtaagatcgtagtgggctgaaaaactctaatcgcctagtgatattatagttgtaatgtggtggtgcaatgcattactcatgtgtttgtggtgatacaggtgtatcacctactgtactaccagtcttacaaaagcatggcccatgccctgacatgcagggcataatacttgataatgacaggaaatggtgatgttgctgctttatgtatttactgtatactttttattgctatgttcgggtgtactcctgtttgttaacttttttttttttttttttttaactggaaacggtctcaggcaggtcctccaggaggtatttcagaagaagtcattgttatatcagttgacagctctgtgcgtgttattgctcctgactaccttccagtgggataagatgtggaggtggaagacagtgacattgatgatcctgaccccgtgtgggcctaggccaatgtttgtgtctcagtttttaacaaaaacgtttaaaatgttaaaaatttaaaatatagaaaaaagaataggatacaaagaaggaaaatatttttgtacaacagtacaatgtgtttgtattttaagctaagtgttaatacaagagtcaaagttaaaaaattagaaagtttatagactaaaaaagttacagtaagctggccgggtgcagtggctcatgcctgtaatcccagcactttgggaggccaatgtgggccgatcacaaggtcaggagatcgagaccatcctgtccaacaggattaaaccccatctctactaaaaatacaaaaaaattagtcaggtgtggtggcgggcacctgtagtcccagctactcaggaggctgaggcaggagaatggtgtgaacccgggaggtggaacttagagtgagctgagattgcgccactgcactccagcctgggtgacagagcgagactctgtctcaaaaaaaaaaaaaaaaaaaaagttacagtaagctaaggttaatttattattgaagaaagaaaaatgtttaaacacaaatgtagtgtagcctaagcatatagtatttataaagtctatagtagtatacagtaatatcctaggccttcacattcactcactctcactcactgactcacccagagcaacttccggtcctgcaagctccatttattgtatgcgccctctacaggtataccattttaattgtttatgctgtatttttaactgtactatttctttgtttagatacacaaatccttaccattgtgttataattccctacggtattcaggacagttacatgctacacaggtttgtggctgaagagcaataggctctaccatatatcctgggagtgtagtaggctgtgccatctaggtttgcgcaagtgcactccacgatgttcatgtaaggacaaaatcacctagtgacacatttcacagaacgtatctccatcattaagcaacaacacatgattgtattttttttggagacagagtcttgctctgcctcccaggctggagtgcaatggcaccatctcagctcactgcaacctctgcctcctgggttcaagtgattctcctacctcagcctccctagtagctaggattgcaggcgtgcacaaccacacccagctaattgttgtatttttagtacagacgaggtttcaccatcttggccaggctggtcttgaactcctgacctcaggtgatctacccgtcttgacctcccaaagtgctgggattacaggtgtgagccaccacgcccggtcagcaacacatgattgtatttttaaaatactgggaaacattttgctctttgaggtttttattcctggaagtgggaatagaaaggagctgtctgtgagctgctgtacaaacatcctgaagcaacaagcttattctccagctttcgaaaagcagtgagcaattagtttctaaacgaaggccatgacagtggaccccagagaggaaacccaatttgggagatacttctcaggtgatatggataaaacttgatatctcagtggatttgaagtattagggtgacaaaatcacgctgattttttttttttctatgagggagcaaggaaatttggaataagtttgggaaaaggagaaggtgggattataaactcagttttacacatatgaaatttcaggtggccagagaaaaaatctgggcgtattttgaaatttcctgtgtaataagggcagataaaggacttggatcatctgaatatcagtcaggttttagaagtcattgcatcagctcagtttagtcagaaaaaaatgtgagaggagaactgtgttatgggacctcaggcaaactgatggctaatcagagccattagatttagtgtttagaagagacatagtaacattatcagtagagcatagtggggtggggcaggagccagattgagagggattgtaaaataaatggaaaataagagggagtaagggaaggcattagctgtagagaagggattacaaacacttatcttcactctcatgagcagcaataatgcaaacactgagcagagtccagccacgggtgctcagcagtgttatcactgttattattgattatttcttctctgctttttacatatgaagaaacatgttgtgaggagtttgttggcatcagtttcatctgaggaaggaataggtaaactatacttgcatgagtaagattgtatcagacaatgatggcagtatgaaaataaaccattgcccctgtgtgttagagtgcctttttctggcttcatttaacccatattcattgaacccttgttatgtgctgggcattctgataggcagtggagggggagcagtgaatatgaccatgaccttctcgtggagcctagcattcccagaaataatgggaatgtcaattctgataaggggattcccatacagggtgctattgatagcatcttctggtgagatggctgatgggtttgtttattctcatttttttaaataaagacggggtctcaatatgttgcccaggctggtcttgagttcctgggcttgagtgatcctcctacctcagcgcttcactgtgcctggctattcccattttatagatgaagaaactgaagaccaaatagcgtaaatgatttgcgcagggttaccaggtcaccagtgtctgagtataagtgacatagcatgcttctaataactcacgtatttcgccacagtattctatcctttcagatatgacacttcctgcccttccactgcaccccacttttatccatgtaccccatctcagcttcaagctcagtacaaggcttttctctctagaacacctcttttatgtcctattttcctgatgcatttacatttattgtctgctgtgcatagccattccttatttttgtactttcttagttttgatttgtggctataaattttagcctttcgcagatacctttggttactacttgttttgaaatatgctttaaagctggatgcagtggctctcacctgtaatctcagcattttgggaggtcgaggcaggaggattgcttgagcccaggagtttaagaccagcctgggcaacatagtgagactttgtcgctactaaaaatttaaaaaaaatagccaagtatggtggcatgcacctataatcctagctactagggaggctgaggtgggaggatcacttgagcccaggaggtggagactgcagtgggctgtgattgtgccactgcacccaagcctggggaacagagtgagaccttatctcaaaaaaaaaaaaaaaaaagagagaaatacggtttatctgcctgcctagattgttacctcaatgtgggcaggaacttcagcttttgctgctttttgctcataatgctaagtacaggtaggcagaaacaggtcatttttcacgtctagattttctgtagctaacattgcgccccaaagactgtgttctcagtcccgttttgtggacgccaggtgtccagattctgttgttatctgtccttgcaaaatcatttcccagagtgtaatgtaacttgtggaaaaattcaactccatttttcctaaatcaattccatgattacctagcaaagtattacagttgcaatctagaagctagtatgtaggtcacataagttatatgtatttgaagaacactttgaaaatcttgccattactaggaaatttattatagttggctatgcattatccactttttctaaaaacatttttcaaattatctgtgtaaagtcctgagctacattttctctccccatcccaagaagatgaaatggaatgctgaccctggtgcgggaggcagctttctgatagatggggtacaccagccaaacactctttgccatgaatctggcagtttgctttggaacagatgttctcgttcccttctcctcctgccctccctcctcatggtaaatatgtcaggggcagtatatatatatatttactgcttttcatttatctgggatgaaaccagtgcttgaatgaaaactaagtgtctctagcaagaagggacaggcttactcataaaaatacttaggaagcagattgaaaaaatgaagaccttctggaatcagcctaaattagaatatgtctgataatttcttaatcagtcacgctccttctcttttcttcatttgaattttattttgcttttaaaatcaagatggcgcatgccctgctttaggaaaacatggtatcctctggacacatactgttaaacactcatttcagagaaggatatttgcatttcacaaggattctccatttcatcagatttttctttctttaaagttgagctcctttaatatatttaaatttactgaaaacaacatcatccacaacagaagtacatataatctttaaggaaacttgcagttgtgtaacactaaatttgtagtaactaggacttaatgtctgaaactctcctccagaccactgccatctaaaaacttcccatggaagcttcgtgaagacctcccaactttcgttgatataggattccagggactgtatgactattcacatttcttcaatccctaccctatgaaatcccgtatctcctggtcaggcttggtcgtatgatttgctttgggaaatggaacatcagtagtatgtgctgtatccaacttctgaatagaagtgtttgttgtgattacaaggttcagattgaccttctctgctccagtgctttctaccctaagaaggctgtatcctgacagaagctgctctttcagccttggtcctagaacaatacgatgctggtaacagacccaaatccaacctacagcctggaatgtcaatgatttatttaataaatctttagaaaatgcttaggcatgaatgatacagcaaagaacaaaaagatgtggtctttattctcattcttcttaaaattaagtaactgaaaccatcctttttttttttttttttttttttgaggtggagtctcactgtccccaggctagagtgcagtggcgtgatctcggatcactgcaaccttcacctccagggttcaagtgattctcctgcttcagcctcccgagtagctgggactacaggcgcgtgccaccacgcccggctaatttttgtatttttagtagagacggggtttcaccatgttggtcaggatggactcgatctcttgacctcgtgatccgcctggctcggccttccaaaatcccaaagggattacaggcgtgaaccactgcgcccggccaaccactttttaaaatactaaaataactatgaataaattgcaaaatggacatgcattttttgaagataaaggactagaatgctaagaactttcagagttctgatggtctatgtaaaaggaatttctcgaacctttgagctacataccactgcattcatgccagtaggaaagttttgatggcattgactggcaggtgtatatgtaatatgagtttggggtaaatcatggacccagaaaagcagaagtagaaagatagggaagttggaggcatgcaagtgtatatatccttgcaatccttagttatatccatgcaagagaggaaatgataaaaggcattaaagttgccattcagctgcatcataagaagtgggttcagaagtaaacttaactactattaagataatgatgcttaaggatgtttttagtatctaaagaaagaattaaggaataacataggagtaggaaactgtgtaacggagttgttgaccctggtagtagagtttggggctgtaagaatgaagtgctgactttgcctaccagaaaccattcccagcaggagatggaacatgttgattgagggcgagggctctagagttctagtacctaggttctgaccttcattctgggcttagtcattgtgagagcttgggcaagtaacttaatctttttaaatctcagttttcttatgcatatgctgtatccacctcataaaagctttctgagtattaataagatcatgtacataaaccatttggaatggtgcctggctcattgtaagtgctccataggagatggtattatttgcaattgagatagaagtgctccttctacagcaagaatcaggagccctggaggtaacaagtttatcgaagaattttgtgagagttcctggtatagtcttatttctgggtctcaagctccctaatcaaatacctgtttttactgggactgacttttatcatcagaacatcccttaaagtagttggaagctagcagccttggattaaaagctggctgatagaattcaagtctcatacagtggtgtgagttgtggcaccaaagctgtgtttgaaacataagaatgtggttgacttttcaatctatttttaaaaggctggtgaactacttcattcttgggtagccctagacctttacttctccttgctggcaataaaattcaggatggccgggcatggtggctcacgcctgtaatcccagcacttcgggaggccgaggcgggcagatcatgagatcaggagtttgagaccaatctgaccaacatagtgaaaccctgtttctactaaaaaaaaaaaaaaaaaaaaaaaaatgcaaaaaatttagccgggtgtagtggtgtgcgcctgtagtcccagctactcaggaggctgaggcaggagaattgtgtgaacccgggaggtggaggttgccatgagctgagatcgcaccattgcactccagcctgggcaacagtgcgagactctgtctccccccgccaaaaaaaaaaaaaaaaaaacaaaaatcaggactgcactcagcttgcactataagatggctgtattcatggaacagcttgaaactacaagtcatgcgacgagtctttgccatgacttttgtgtcctctgccacccactgagggaagtgtctgccttccctgatggcatgagaaacgtcacgcaggctgtaagaacacgccacccaggcgcccatctcatctccacactgagcatgagccacacccgcctggaggcgtgagggtctaaccaccctctttggttacagatcatcatttttttttcctgcctgtgtcttaggaggatcacaggaggtagcattaaagcttttctaagcattattcatgctacttgacccaatgtctctgtgtgaagtcccacttatttagaagaacaaggaactgctcctagctccagccagggaactaaaatattggttcttagataatacgtagatcacagtgaatcttttttatttggagattactattccatttggtgctggcattgccacatgactctaggatgaaggaaacctattctctggacccttagtcaagaacacgtgtccataatttcagaaacagcagaagtgttgctggaaggagcacactatggggtatgatgtggtgtggacatttaagagtatcatgctcaattcggtgatgaaattgtgtgaataaattgagtgcaagaaagcccacacgttctcagttgccacttcacttaatctaccagcagcatttgaactgatacactaggtcagcccctcttcccagaagcacttttttttgcggagtttccaagactccccattctcctgactttgctgtggtctcctttgctgattttacctcgtagtgctgatgtctgactattgaagtgacctggggcacttcttttgatgatcccacccaaacacctccctgtaaataccatgtacacactgacaactccaacatttattacctttagcttagaccttgcccctgagcttcagacacacatccaattgtctattcgtttgatgcttactttgtatgtccaatgggcatctcaagcctaacacaaccagatcaaaactcctgaccttcccctctaaaattaggttctcctgcaataattctcttctcattaatgggaagtctatccttccagttgctcaggctaaaaaccttagggtttttcttgactctgtttgtcctctcagatttcagatccaagtctgtaaataaatactataggatctatttccaaaatatattcagaatctggccatttttcacctcttctaatgcaacatcctagtttaaactacattatgtttctcccctggattgtggcaaaagctttctggttctgcccttgtctttccaggttattctcaacacagcagcctaagtgtcctttagagtgataactacatgacatcactcactcttagctggtggttcttcctttagcatttggttttccatttcacttggggtaaagcttgcaatggcctacaaggtcctgcaggagcctcttactgccttggtgatccttccctgccactcccttgctctatcccatatcacctccctccttgctctatcccataccaccatcccccgtactggcctctttcttccacaaaaatgccaagaacattcccacagcaggacctattgatgcagggaagcaagccccataacgggggcttagccctggagggctcttgacctcatccaggaaggaattcaagggcatgctggtaatgttagagagcaacttttactgaagcaccagtgaacagcaacagcataggtactgctccttgtggagcagggctaccccacacacagtgtgcttagtgtagcagctcagaggcagttctgcagccatatttatatccacttttaattacatgcaaactaaggggagattatgcagaaatttctagaacaagggtggtaatttctgggttgtgagattgttgccatggaaaagggtggtaacttcagggtgttgccatggcaatggtaaactgacatggcacactggcgggtgttttatggaaagatgcttccaccctatccctgttttaactagtcctcaatttggtccagtgtccaagccctgcctctgcagttgagtcttgccccctgagtttagtcccacctcctacctctttatagcttgttcttccgtctgcctggaatcttcttcccccagattaaccccatagctaacttcctcacctgcttcagatcattacttgcaggtttttacacatgggctacctcttggtgaactttccctggccatcctttaaaattataactcttttgggctacacttacagccatctgaaatattatatattttatagattttttttaactaccctttccatctttcacaagaagggtgcagaaatatttgttgtgatcactgctgtataaacattgtctgtgtacaacaggggctccaataaatgtttactgaatggatgaaagaatgtatgtgaatgctgcattggcatcagagttggcacatatttatgaggctgactttttggcatcaagagcaaactgttcaccaaggaagttaccaggggaatctattgaatcaatgcctttgttcacaaataggaatttttgctttcatccaaagaaacaagattttatttgttttggtttttaatgagtttaatttagctgaaaatgtttccagggctgtcgaccaatggccaggaagtcaagaagttgctcttttttagcagaaggtgaggtaacgacttcaaatagggtaattatatttattttgccatcctttaaatttcatgttactaactgaatttgttgaattcttgcagctccaaaactactgattatagattcataaaactaagagatcctaggcttcttctggaagggttatatttgcatattctgtgtcatgtaacatactgaatccttctcttaagacacctgtaggaaattatacttcctacactagtggtaatcctttccttttcttttttaacatttgacatagaaaatttcaaacataaaagtatgtagaagagtataatacaaccttcatgaatccataatgtagcttccaaatttatcaatgtatggccaacctaatttcctttatagcttttctgattatcttctattttctttttcccatactgagaatcctagtcctcaacaacaatgaaaattatatatttagaatattacataatttttttttgctcaaccccaccaagacacctgaactgatcttagaaaacagtagccaatactgccaccaacaatacagttactgaaagtttaagagtttcaacacatcattttaacatcagttcttctgagtgtaataatacaagtacatacacatttaggttaatttgttttggtttatgttaaatttttaggtgttgctttttacaaaaataattttgctttataattaatgtaaataagtcaaatccactaaacaagatactttcacagaagtctagcttccattcttgaccatttcattctagaactttccttaggtaaccacttaaaaaaatcttggcccagcgcagtggctcatgcctgtaatcccagcactttgggaagccgaggcagatcacgaggtcaggagatcaagaccatcctggctaacatggtgaaaccccgtctctactaaaaatacaaaaaatttggccgggcgtggtggcgggtgcctgtagtcccagctactcaggaggctgaggcaggagaatggtgtgaacccgggaggtggagcttgcagtgaaccgagatctcgccactgcactccagcctgggcgacagagcaagactctgtctcaaaaaaaaaaaaaaaaaaatctttatggcttattcttctgttgttttttgttagctttttgcaattgttgactgatgtttgatggaatggggaggccaatgaatgcatggtgaattattttgattaaggggtaggtacatcctctctatgaatgttccgtaattgagtctactctcctctgctgatgggttgtttctaggcttttgctgtttcacagagtcctgcagttcattcttttcagatatatctttctaaccagtgactcttgggcatcaatttttatagaagaggggttactgagtgagaggctaaacgcatacatagatttgttagatgctaccaaattctcctctgcaggaattgtgccattttgggttcctacctccagtctacattgcaacgactatttccctcagcctcaacaacagtgtgtcgctaaacttttggatttttgcaaatgttatgggtgaaaaaactgtacctcaatgtatttctagtttgatttttctcatatgggaatgaaattgaatccttttttcatgtggtgaagagatttgcatttatttgcttggaaactgcattttcttcagtgcatttttctatagcgtgattggtctttttccttttctattttaccaaccccttcatctgtgatacaagtagcaaagattttcctcaatttgtcatttgtcttttttccttgcttaggatgccttttgccaacaatagctttttagtcttatttctatgtaattaaattcatctatgtttttttatttcttctggattttgagtcacagtgagaaaattctcccacgttataaagtgattcacacacattttcttttagtttttgtatggttaatttatttacatccgagtctttgatgtgtttgaaatttatcctgatgtattcactaaggaaaatgactatgtttttcccatgtagctttcctgctatcccagtgctacttagtctctaatctttcctttccctcaactgatctgagatacagcctttattgtatcttaaatttgcatttgtaattgagttgtcctttctaatgcttattgacttgaaaattattcatgtatttgacctgtattatttatgtttccatagagccatttcctctgggtaaagtgaaggaatccttaatcagactctttttcataggagtaaaggtcagagtcaaattgcctttgagatttaataatctcaaattttaattttctctctaaaatattttttctatctctgcagcctgtaaacaattaaacactcaatccttttgcgtttcacagattttattttattgtcagtcttaactccctttatttctcatacttaatcagcacataatcccaatttgtctcctaattatttctcaaagccttctcatgcgttcctatttccagttctttagtttccaccttaagcacatctcagctagaccattttaatagcgtttcacttgacacttctgcttgcaaccttgcctctctcagatttgcctacttcacagctaccaaagggagtttttaaaatagtaagctgacctgtcttgtgtttaatcccctgttatctgcaggacaaaaatcttggttccttaacaagtctgaggagctctccctactccttctcctaacttattctctgccctttgtccctcataaattagcctttagcaatcctataccacttattggtcatccaaggctccaaactgcttcagattgcttcaaacctctgctggtgcgctcagctagtcactcagcctgggatgcctgcctcttcctacctttccatccagaggtatcacttcctccatgaagcttttcctaccctgatgctgtctgcacatcaactgcacaactccagccctgccccatgcactcacattgtattaaacttatatgtagatgcatttatccttcacttgactggaagtcgtttgtgagtgggaacaaatctctgtgaatgacaagattggtctcaatgaaaaacagccataatattcattgttcttggtatatatctctatatataacatttactatattgtacagtatagagagcagtttgtccccctgctagtctgtgaacatcttgtgagatggaacttaatttcatttgtccatatatccctaagcctaggatagtctatcatatgtaataggacctcaagaaatacaagttgctgggtagaaaaaaaaaaaagagagatcatgacgacaaagggttagaaaaatatgattttggagaaataattgaaataactgagaatgccaacctcaaaaagaaagagcattttcaagatagagaggaaaaggctggtcagagtgtcagcatggagctccagaaagcagaactggaggcagagcagaaacatcacagagggacagatcacaacttcctgcagagtaagcggaaggcgccctcgggaacttgtgaggctcatatcactggaggtttccaaaacgacagttcagaaaccccagtgagaaatcactacacacccaccagaatggccaaaataaaaactagaacaccaagtgctggacaggatgcagagaaaccaaaccacccatgcattggtggagggaacgtaagacagtgcagcccctccagaaagtggtttcgtaatttcttataaaactaaacacagggttaccacatgacctagcaattacatgcttaggcactcctcccagagaaatgaagacttgtattcgcatgaaaatctgcacaaatgataatagcaccttttacatttacaatagccaaaaactggaatcagctcagaacaggtgaatggctacataaattgtggcacatccataccatggagtcatcctactctgcaaaaagagaaacacccttgatacaaataacaacctacaaaaatatcagggaatgatgctgagagaaaaaagcgaatccccaaaggttacgtactgtacgatttcatatacatagttttgaaatgacaaaattaagaactgtccagtttcttgactgtggtggtgaatacgtgaatcaaccaaggtgataaaattataataaacacacaccccaggactgcttgtccctgtgctactttttcttacaccaagaaaatctgaatatgattgatggattgtatcaatgtcagtatcctggttgtaacatactgagaaataaaaataaaattctaagcccccaactgaatggacaccttcttgaccaaggggaccccaaaccctggaagctgagttcatggccatgatgggatgggaggtgggacacacctcattatgccccctcccttactaaccaccacaaggctttcttccctaagggctaaacaggaatcagatctttcaagacttcatagtgagcattactagcttatcttcccaagtagagaataaagacaggatgagatgagtcattccttcacccctccctgagacatctgcttcctctcttccctttttcttcaaatgctcacctgattgtgggtaaaatgtagatttactgagcactaactaaagtctcacagtatgtacccattggtctcacagctccctctctccttttttttttcttttttaaaggaaaattataagtactaaacctcccaagaacctctttggcaaaacacccacaggtgcatctgtgacttgcatttttcttgggcccaccctcaagctggctcaataaaccttaattgattggggcacttgcctcagtcattcattttggttgtcaatattataattttgcaagacgttgccaatgggagaaacttggcagagtttatagggaaacgtctcttatttcttacaactgcatgtgaatacaattatctcaaaaaaatttcaattaaaacattgcaaatggtcaaaatcatcctataaaattcctaaaatgtattatacagaatttatgccccatattaggggctaaaattcagactctcattaaagcacaatgctgaaagttaaaacaacaggccaggtgtggtggctcatgcctgtaatcccagcattttgggaggctgaggcaggtggatcacgaggtcaggagatcgagaccaccctggctaacacggtgaaaccccgcctctactaaaaatacaaaaaattagccgggcgtggtggcgggcgcctgtagtcccagctactcgggaggctgaggcaggagaatggcgtgaacccgggaggcggagcttgcagtgagccgagatcgtgccactgcactccagcctgggcgatagagcgagactctgtctcacaaaaacaaaacaaaacaaaaaaacaaaaccacaggttgggcaatccttctcagggatttgtagagagagagtgagctcatatatcaattagagttggaaggtgtgaccctcaaggggtccttctacttgaagaacctataattttatgattctttctgttaatcgtgatttatttctcttatcaaagtcatcttagatcatcattttgtcttccaaaatgctggcctaatttccatcttggagaaatttgtatccccaaatggtcttttaaaaatacttttttcttttttttttcgattattggtaaaaatcagcattgggcacagaatgaaattctgtccaacactctaattctgatcagttgacttccattctctgtctgtgggtagtgcttgatcacctaagacctacactgcaggatcacagaatctgagcatcaaagaggaccttaacccatttatgcctgaggttgaaatttatgcctgaggtcacctgcttggcgatgaccttgagcagtaggatataaataactcccacatgctcagtgttccaataatggaacgcaaaatacctaagctaaatacctccagcatcacaggcatctggatcaggtttttatgatttgctgatgaatgttcagtgggatttattagactctctttagttcctgggtgaaaaaaaaaatagaaaatagcattttgaaataacaatttttaaaactctcaacagtaggtatcttaactccttttcttccagcatgtcaactaattgtttcttttctccttttaaatatgaaggagtaagttcaaagcagtatctctagagattggaaaaaaaaatggcattatattacaggaaatatactctggaaagccagtgggttttttacaggtgtctgtccaggtataactgtgtaggtagccacaggttcctttgagtgctgagtttgggacagttctcatagtatcttggatgtgcttagctgctcattcctccattaagtacctcagttcacatgcatggacatgctattcttccgaggatccttaaattgaccgcaggaggagccctagctgctgttccccatttgataccccttttcagcaagaagtagccagaaatagtcgtcgcccaaaaccccctaacagcagttagggtgacctctccacagggaggaatattataggagttattaagacattattttaggcagctagaggggaaaaggggtccttgggaagttttcgtttcttttaaagcggctccagaaatgtttcttgtctagcaggaaagccccagctctagccggccggcaacctttgatacacaagtgtgggccattagaaactgggtccacccaaacatggcgattcccgtgtcttcttgcctttgccttcacatgtgcctggcaacatggcgcccccacatatccccaggtgtgtagaacatcatggcggccttcctttacatattaaaaggctaggttgggaggggcaattttttcatgggctacataaatgacatgcctggtcaaaccaatcccctgagcccagtgcaaatcagccactgccttctccagcctcctcatataactggctggtttcctctctggggtttggagccccctgtccttccctctctgtatgggggagcttcttccttctttcttgcctattaaactctccgctccttaaaaccatacacacaaagcacctcagttcagtacttagccatgtgttctgaaagtgcctctgtatttcagccttgcctgtctgctggatgctttcagcttctgcttgcaccaataaggcaacatggacaattttccgcttatgtgataaatgagaatgtgagaaagaaatttcttcctccatgcttactgttggagtttgccatcttcttaaatgggcttcaagaatcatctagttcaatttcctgcccaagtttaaatttttatgaggatttatattccttcaaagtatttattgtacttgctatgtagagaactgctaagataaattttaaaagatgaagaaacaggaaggttgtgtctgacccaaggccaataagctagtcatgacaaagttgggtctagagctcatggatggaatttccctccatataagcttagactgaaaggtgcttcttgtttttcttttcttttcttttcttttcttttttttttgagaggagtcttgctctttcacacagactggagtgcagtggcatgatcttggctcactgccacctttgcctcctgggttcaagtgattctcctgcctcagcctcccgagtagctgggattacaggcacctgccacaaagcctagctaacttttgtatttttagtagagacagggtttcaccatgttggccaggctggtctcgaactcctgaccttgtgatctgcccatctcggcctcctaaagtgctgggattacaggtgtgagccactgtgcctggccgctttttctaaaattttcaaagcactggtgtgttaggccatttttgcattgctataaaggaatacctgagactgggtaatctataaagagaagaggtttatttggctcacagttctgcaggctgtacctgatgcatgacatcaatgtctgcttggcttctggtgaggcctcaggaagcttacagtcatggaggaatgtgaagaaggagcaggtgtgtcacatggcaagagcaggaacgagagagcaatgaggggaggtgccacacactttcaaataaccagatgttgcacaaactcagagaactcactcatcaccaacaggatggtgctaaaccattcatgagagatcagttccatgatgcaaacatctcccaccaggccctacttccaccatcaggaatcacatttcaacctgagatttggaggggacaaacctccaaaccatatcaacaggaacaccattgtttttctaactagtctccataattattaacacctttctctgccaggaaaatcttgttgactgcagaacttactctgtctttcattccaccttctctggaacctgtccaaggacaagtccactaaataatccttcatcaaggcacattattcctcctctagtaaaaacagcaggatttctagcttccacacaatgtatgcttttaaatacattcataggataagttagtcactggagaaagtttattttatttttaagtgttttgatcatgaaaagaaattatgaagacccatttactttgaagtagctttcagctattaaaaaaataaaaaatattaatagctacgtgcagtgatgtagaagaatctcaaagacttattaagtaagaaagcaagcagcaaaaatatgtattctttgcttcccttttgtctttaaaatctgtatatttggctgggctcagtggctcacacctgtaatcccagcactttgggagactgaggtgggtggatcatgaggtcaggagtttgagaccatcctgaccaccatggtgaaactccatctctactaaaaatacaaaaattagccaggtgtggtggcacgcacctataatcccagctactcaggaggctgagcaggagaatcgcttgagccccataggcagaggttgcagtgagctgagattgccccactgcactccagtctgggtgacagagcaaaactgggtgacagagcaaaactccgtctcaaaaaaaaaaaaaaaaaacaaaacaaccacaacaaaaaaactatgtatttgtgtatatgtgtgtataaaaatgcatggagatctctacagaagtatggcagactgttagtcatgattacctctggagcatagtcagagggataggaggaatttttgtatagactataatagattatacttcagtgctgtgtttaaaaagaaggatgtattgatatatgtattagtccattcttacactgctaataaagacatacccaagactgggtaatttataaaggaaagaggtttaatggactcacagttccacgtggtgaactgaggggaggcctcaccatcgtgacggaaaatgaaggaggagcaaagtcacgtcttacatggtggcaggtaaaaaaagcttgtgcagggaaactcccctttataaaaccatcagatctcatgagacttactcactatcatgagaaagacccgcccccagggttcaattacctcctaccaggtccctcccacaagacatgggaattataagagctacataaaattcaagatcagatttggatggggacacagccaaaccatatcaatatattccttgagaaactttaaagtcattgcagaaacaaaaagtaggcaatttcccctcttacccctacagaaccaaaaacctaacaattcatacctctgttaaatgcctgttccaatttgaaagtcctcttatagtctactaatggctaattgaaggctcttttatttgatagctaaccaggacgaccttctgagtatttttctaatcctagttcaatattcatggttaaatgttataaaatacatcttaattttaaattgcatcaagttctcaattcagaaatagttttaaacactattctggaggaagttagtgtttgtctaaaatcttgatgaaactgagcatttctctcagaactaatgtcagagctggtttctctgcaacttttccaggttttcctagcttgtttatcaaaagcttccttggtagtcagtaagaaacctggaccacagatggttggtttattctatttaacacatgcctagtgacggatcaacctttagggatccacagaattgctggttgtatataggaagtaaatttttcattagcctttgagaagtgttgattgttttcttgggcatagttatattggtagacatttctgagtgcctcactaaatgccttactgctgttagctctcttagtggagacatggaagcaaccggggattgaaataggggagtttgttcattttctcattccttgcatagtaatttatgcagcagcctccagcggccaggctctgtgacaaaccctgggtagacagagaaaatggagacatgacacctggcattgagtcacttactgttcagacctgagtagcagctgtccctgggagggtgtgatgcatagggaaaggatgctgtgggagcagaggacaggtttgtatgtcattcttgcaactcatggtagggctgtttggaatgtgaggctttacctgggttttgggagatgaataaaagaaagcagtgagagaagagtgcattttggacagagaaacacaattgcagctgagaaactacagccattttgctcaatcatgtgaaactgtaaaattgctagatttttttttaggtcaaaagtatcatatagggccaggctcagtggctcacacctgtaatcccagcactttgggaggctgaggtgggcagatcacctgaggtcaggagtttgagcccagcttgaccaacatggagaaaccctgtctctactaaaaatacaaaaattagcaaggtgtggtagtgggtgcctctaatcccagctacttgggaggctgaggcaggagaattgcttgaaccttataggcagaggttgcagtgaggcgagattgtgccattgcactccagcctgggcaataagagtgaaactccatctcaaaaaaaaaaaaaaagtatcaaatattggcagtttcatatggtgcaacgtaacagttcctcgtgactggagaaaaaggtgtctgggatgaaatagcagagagtgagctgaaagtgatgggcaggaccagatgtggaagagccgcttctacactattcacattttgagccaaatgagctttgtcctgggtgctatcctgtgcattgtaggatgatgagcagcatccctggcctctacccactgaatgctagccgctacctccgacagttgttaatgaccagaaatgcctcagacattgccaaatgtccctggagggaggggtgggaaaatcgtcctagctgggaatcactaacataagggatttgaatacaaccttgaaaaccacgggaaagcatggaggctgttcatgggagaatatcagatttgctctggtagcaaatggattagcagagggccaggcgaggtggctcattcactttgggaggccaaggcaggtgaatcactggaggtcaggagttcaagaccagcctggtcaacttggtgaaactccatctctatttaaaatacaaacatttagccaggtgtggtggtgcacacctgtaatcccagttactcaggaggctgaggcaggagaattgcttgaacccgggaggtggaggttgcagtgagccaagatcacgccactgcattccagcctggttgacagagtgagactacatctcaaaaaaaaaaaaaaaaaaaaaaattagcagggaacagataagaggcatggatccacatagagcaattgcaataatcagataaaggtctgatggaagaagggtgggagtcatagatattaggggtttggaaactgaattatgggagagtgtgtgtgtgagtgtatgtggagtcaggtgagtaaaaggaaagattccaaaatgatgttaaaacaaagtgtgtgtgagagtaactagagtgagggctggcaagggttaggacaaatgtggataaagcggtgccatgagcaactaaggaaactgtctatgaggatggagaagtcacgtttggaagagttgatgaggatgatcagaaatgccaacttgatcccccacccctccctacctcctgtctggcgtagtgtgaacaactgtcactacatggaagccagctagaaacgctcgtagttaatgtctgacagattctgtgcatttgatgagaactgaaaatgattgatgttcctagtaccttggatgtgccatgctctttctcatctcaggttatctcatgggttaatcctcccacctggtaagtgcttcccatctttcttcatctaccctttttcttaaggtcttaaaaatagcttcatcaggaaaaccttccatgacctctctccacaccccagaaatagtttaggtccccctgttttattctttcatagcatctgctacttcgtgaggtactcggcatgtgttaaattttgacctctttataaacattggtttcctgtccctctcctctctagacagtgagctccatgtgggcagggaccggtttctgttgcccacagctctatctccagcactggcataaggcctgctatttacaggcagtccagaaataggattgaccaactactccacttctggaattttttccgaagccaagtgaggtgggggatgctagattccacctctggaatgtggtttgtgtattatttttataatacatagaattggaaggaacctcagagttcatctagttcaaactcacactgaggaagggattgagaagaggcagaaaaggaggaaaagcccttccattgaatgttactgagggtcccactgtgaccagatggggctcattcacacccaggagcttccagacatgtgggaggcctctcaaaatagcctatccaggccaaggcgggcggatcacttgaggtcaagggttcgagaccagcctggccaacatggtgaaactctgtctctaaaaaaaaaatacaaaaaattacccaggcctggtgatggatgcctgtaatcccagctactggggaggctgaggcaggagaattgcttgaacctgggaggtggaggttgcagtgagccaagatcgtgccattgcactccagcctggatgacggagcgagatatcttaaaaaaaaaaaaaaaaagcctatccaagaactgatggggagaagcttgaagccactgccgcctgtctccttagatggagagctgcccctgtaggtattgatgaccccccaattctggcttgcgcctgtgtgcttgcagggaaggttctctggggagaaagcaaaagacacctggggagatgctgtcaacagagaggaagtcaaagttcatgcagacctggcctcaataaacacagccaaaaccagagctgtagagcaggtgagacagccctagagtgtgctgcagaggaccttctgcacccctggcaagtgaccatctgacctggtaatgtccagtacggaaccatgccaaaggcaccgcctcaccgaaagggatgattaagcatctttccgaaagaaaaactaacctccacatgttttctgtttctcaggctggcgctaaaaggtttgattgagtaggtaggatggaaggaggtttccaaggttctgcaatagaaatgctgggaaaatagagactttaatttttttctcctgttgtttttagttgtcactgtgtgatttattgctgcagtaaattacttctagcttctagcactgtttttggttcttaaaggattctatatctatttgccaattattataagctttttagtttatacataggaattatattcactttcatgttttccagtcttctattcactgcttaccatatgcagtgctgtttttcacttttaagataaacttcctttgagcaccttcatgttagaaggaaaaatgcatttggacattagaaaacaaaatactggttgtagagaaaaattatgtgagcatagcaaatgaaggtgtagctttcatagacacattaaattcattttatagaatagtaccaacaaaatcctgcatttctctatagccagctgaataataagctaaccctattaagcttctgatgaattagtaaatattgtataaggtaggcaaccatatagttcatttaattacccttattttaaattatttcctttagtgttatggagatagagctaccttgacatctataatcattttccttataactctttatttttccatgtttttataatgcacaagaaatcataaaaatacctctttggaaaacttctcattaatgcagtgaaggtcaatgtggtaaagattcatgcaaaaaaataaaaagtgtcttacttgttctattttttctggtggaagtgataaaactgtgaataatcttatttgttccatttattctctagtttatctaaattacatcttacagttatcctgtcacaaacgtaattgactaaccttgtgcctgaaatgtattccatatcattctctcggcatgaatgggcttgaaatctcttagtcattttctcagcaacactgatagcaggggagagtgctaaggccttggaagaacagaagcatggtgcaggcggaagccggggtgggagaatattctatgtggaaagcaaatatgttccttttctttgaccttagaacatgactccaacctcattcattcattcaacaaatgtttactgaatagccctatgtgccagaagacactctagttatcggaaatgcacagatgaacaggacaagcagggtccctgtcctcaaggcctctaccagcaggaggatggagtggataggacaatgcaagcattgaaaccaataacagctatggaacagaccaggggcagagagtgcagggacatcttcattttagacaggactgtcaagggtagcttctccgaggaggtgacatttgagcagagatcagaacagtgaagtgtgagggtctgaaaggacagaactccagatagaagaaaagtgtggggcctgagcacaccacctaatgtctaggtgaggtcacatcacatcacatctctcatgtggctgaagaatgctgaggtgggaaaacattacaggatgtgggcttggagagtcagcagaggtggggtcccggcggccctcacaggccacaggaaggattctgtgtttaatcccaagtatgatgggaagtctgtgaaggaaggggaggggtccacatgatcctgtttcttgttacagaagaccactcgggcttctgggtgggcaatacgctgcaggtggtgagagtggacacagaaggctgttgcaactatctgattaagaatgaggggtgggcttggctgagcctgccagtgcaaggagtggagaggggtggagcacttttggaatacgttttggaggtactgctgatggggaccaataatggaattgatgtgagtagaagagacagagaagaatcgaagatcatgcctaggcttggggctctggcaggaggaatgctggcaccattaactgggatggggacaatgggaggaagaacagaatttggggaagtctcaaggatggtgctttgcccatgtgtttgcgatgcttattagaccctggagtggtgatgttcagtgggcagttagaacagtccagggctcagaggaggggccagggccagaaataaaaatttagccattattggcatgtgggtgatacttaaagctacaggactggttctttcattctatttgtactctgtggcttttactcactccaggaattcttcctgttccataatgtgtcttctctcaaggctcatgctttgcctatgtccattttttgtcccatgtgcagagaaagcttatgcacatgggcatataattggcaggaggttcttgggggctggaaaagcaggcgggtggtgggaaaagatcccgggacttggaatcagagaaccttggatttaggtccgtgctgggccactccctccctaagcttcaagctccttatctggaaaatagtaatgataatagctttcaatgtatgggatggcaagaggcttttgtgtataaatacaaaatagacttggtatatagtaggtacttgatcaataactgaattttaatctccttatctagagtgtggggtccctgagatcagagactatgcatttactctttgcataattgaggccttttgaaaagtttgcttttcatcagaggaggtaccatgagtttcttcatttttgtccttccttaagcctgaatagtgggatattcactatatattaaacaaaccacataatccagcaattcccagccttttttgcaccagggactggtttcatgaaaaacaatttttccacaaaactgggggtgggggtgggtgggaaggggatggtttggggatgaaactgttccacttcagatcagttagattcttttttttttttcttttcttttgagagagagagtttcactcttgtactcttgtcgctcaggctggagtgcaatggcaccatctcagctcactgcaacctctgcctcctgggtttaagtggttctcctgcctcacgctgccaagtagctgagattacaggcgcctgccaccaagcccggctgattttgtatttttagtagagactgggtttctccatgttggtcaggctggtcttgaactcctgacctcaagtgatccaccatcctcagcctcccaaagtgctgggattacaggcgtgagccaccacgccaggcctagaatctcataaggagcacgcagcctagatccctcgcctacacagttcacagtagggtttgcgctcccgtggtaatgtaatgctgctgctgctctgacaggaggcggagctcaggaggtgatgctggctggccgtcactcacctcctactgtggggctcagttcctaataggccattggtaccataatagtttgcagcccggggattggggacccccgatataatcaattcttttttttttaatgcttagcctctgtttctctccctcccaaggcccaaaggcaactgttaaacctaatcaagaagaattctttgttttataaggatcaaaatgtgttttgagacaaaatatgactttattctctagaaacactgcagctactcctaggaaagaatgaatacgcttgcttaattttacatatccggcattttcttcattatgtcatgtgcttttgtccagaatgcatttacttggaagcattcccaagacatagaaaagtgagtgccaacatctttttcaagcataaattggatttgatcatgtttatgttgaatgcatgagatttcgttatttgtttttatataaattctctctactcacgctgagaaaacctctggtacagtgacacttattacagcttttcccaatcaatcaaccaatgtgtattgagcccctactatgtgtagaatacaggactgagcatgtgaggaatgcaaataaatagtgtgcacagtcttgttttttcatcttgcacattaattattgagcgaagggttagctacgtgagaaaagaaaatgcacacagaaacttaagactggaaggagccttagggtgcggtcacttcacttcttgttcaactcatgtggccctttttacagcttcccccaatggtgtcatcttccttggattgatccctgttagagagggggctcactatgtccctagctctcctgttagaattttggacaacttcaatccttaaaattatatcctatgactgtatagaaatttcagtgcctttcacccgatctttctgtgacatgccatgtctacaaaaatttggagatctctcaagtctgatgttttaataactagcatttttgcaacgctggaagttcgcaaaaggcttttgcatattttcttctgacggcaattttgagagttaggtattattctcctcgttgtactggtaagatcaatagatcttagagttaagtgactaagttcaaggtcgcaaagctaatataacaagaacttaaaccttaaagtcaaaactcccaagtctgtttttttccactaaaccatggtatctatgattacaatacaagagtttgcacaaacaatagccaaattgtgtaaagagaattgtggagaaagacgtcagcctatgctggaggtggttatgaaggttttgtggaagaggataaagcacattttttacttgccataggctgagtgatcataatggagttgttttcaataagatgtctgtattttcagcagataaaacttgcttctgttatgaaacacttcaagatttttgattgaacagcgagacgattcaaccttacgagtttggtatatgtgagctctactgagtctgtggaacagaatgttaatgttcttcccttggcctgcatatgataatctgtatgtctaggttgtactcacaagtgctgtattgctgggacctcaatacacttaggatataaacacatagtaagttctcagctgatctttctgacctcccctcacatcttatttggactttctttatgtggccttatttattgctatttccttttaatctatctttgctttctgcaattaataggaaagccctagtttggaaaagacacttcgaaatgtttctcaggaaaggtgttcaagtttaactatatctgtgactgggacttttttctttcatgtttctaatgtaacttgtcaagccattgtcaagcctctagagtgatttgaagtgagtatcagaagcactggcttatactttccaatgtgtttctccctttttagtgtaaatattcatatacattcctgctgtgttctaggaactctgagagatgttgaggctaccaaaaaaaaaaaaaagaagaagaagaagaaaaagacgtgctaagaagctccaggaagaattcccacaggagatgatattagaatgtaatagagatatagaatagtcttaaagtaactaggtagggagtgagggagtacattgctgtagaaagacattctacctcctaagccttggtcctacctattagcaggatctgtttttctcttatccctattgaaacagagaacatatcctcgatgttttgcatgcgttgagccttatggagattgctgttcttagtttttttaatctatcaacaggttctacggcttgctgcttcacattttttctctaataatggtgattaggactaagttaatagcagtggagataataaaaaatggttaaatactgagtgtattttgaagttagagcagttaggacttgaccagaaaatatgaggaaaaaaaaaacaaagaaaaaaaacagaagtcaaggataattcaagcagcagaaggatggagttgccatcaaccaagaagcctatgggaggaagagtcatgtaaagttcgaggtgtctagtagatacccatttggctatgtaagtctagagtttcagaggaagggtccaacgaggtctatgtagagataaaaatgtcaaaattgtcagggtttagtggtatttaaaataatgatattaggtgagacgattggtagatctaggaaaaagaagaggtccaaaggctgattcttgggacactcaacatgtagctatataaaagagaatagaaactaacaaaggagactgaaaaagaggggccagagagtaagaaagaaaatagaaccaggggtggtagctcacgcctgtaatcccagcactttgggaggctgaggcgggcggatcacaaggtcaagatatcgagaccatcctggccaatatggtgaaaccccatctctgctaaaaatacaaaaattagctgggcttggtggcacacatctgtagtcccagcaactaggagaggctgaggcaggagaatcgcttgaacccaggtggtggaggtggaggttgcagtgagccaagattacgccactgcactccagcctggtgacagagtgagactccgtctcaaaaaaaaaaaaaaaaaagaaaagaaaagaaagaaagaaaatagcatgctggcttccaactaaagacaaattttcaaagtgtgagaagtgatgccactgataggtcaagtaaggtgaggattgggagctgagttagcagcacacagaggttgttcataaccttgacacccttgacactccttccatggagtagtgggaactggagacagggaatgcagaaaaatgttttgaaatagttactgtgaagggaaggaaagaaatgagatggtagctggagggcaaagtggggtcaggagggcatttcttttataaacattattctttgtagacatttccattattgaccatccagtgtccaacaattttttctcacccattaaaaatagttggctctctagttatttaataggtctttctagccagagatgctgctcagcatcctacaatgcacaggatagtccccagaacaaagattattgggctcaaaatatgaatagtgtagaagaggctcatccacatctggtcctgcccatcactctcaactcactctctgctatttcatcccagacacctttgtctccagtcataaggaactgttaggttgcatcatatgaaactgccaatatttgatacttttttttttgagatggagtctcattcttattacccaggctggagtgcaatggcgcaatctcgcctcactgcaacctctgcctatggggttcaagcggttctcctgccccagcctcccaagtaggtgggattacaggcacctgccatcatgcttggctcatttttgtatttttagtagagacggggcttcaccatcttggccaagctggtcttgaactcctgacctcatgattcacctgccttggcctcccagagtgctgggattacaggcgtgagccactgcacccagccagtagccccttcttcactcagtcagtcccccttgcttactgtgtgaatatatttaatctgctttatctgtggttccaggttgcatctctttatgttctatgtttccattagccgtggtcatctatctcatctgtcactctggagtttcaatactgcctctccctttctttccaagccctctaaaccttgcaatatctccaatagttagtacaaatgatttgcttgtggtcaagtttctgtttgtccatatctttgttgattcttgggcttatctccttcatcttgtttcttaattctctaatgattccctagaaaaatagaaagtagctattcattatgatgaagttaaatataaatctccctgttgtctatagccaaactgtagttagcaggtactcaggcaagaagcaatgggatctgtttttcaagcaggaaagaacaggtagaaaacaaacaagttcctcgtaggggaagggaataaggaaggcgtagtacctaagtgtcaagttgcacatcatgaaagctacttgctgcctatgaagtaaaactttaaaaatgaattttgatttctataaatgtaaacacattttagtacatttttaaaaattttaggaatagctctatttaaaatatatacatatacatacatatatattcatatacatacatatatattcatatatatacatatatattcatatatatacatatatattcatatatacatatacattcatatatacatatatattcatatatattcatatatacatatatattcatatatattcatatataatcatatatattcatatataatcatatatattcatataatgtatacatatatacatatatattcatatataatcatatatatacatatattcatatatattcatatatacatatatattcacatatgtatatatattcacatatatgtatatatattcacatatatacacatatatattcacatatatacacatatatattcacatatatacacatatatgttcacatatatacacatatatgttcacatatatacacatatatgttcacatatatacacatatatgttcacatatatacacatatatatgttcacatatatacacatatatatgttcacatatatacacatatatatgttcacatatatacacatatatatgttcacatatatacacatatatatgttcacatatatacacatatatatgttcacatatatacacatatatatgttcacatatatacacatatatatgttcacatatatacacatatatatgttcacatatatactcatatacacacatatatactcatatacacacatatatactcatatatacacacatatatactcatatatacacacatatatactcatatatacacacatatatactcatatatacacacatatatactcatatatacacacatatatactcatatatatactcatatatatacacatatatatactcatactcatatatatacacatatatatactcatatatatacacatatatatactcatatacacatatatatactcatatatactcatatatacacatatatatactcatatatatacacatatatatactcatatatatacacatatatatactcatatatatacacatatatacatatatatactcatatatatatatgtttttttttgagatggagtcgtcgtcttatccaggctggagttcagtggcgtgatctaagctcactgcaacctccgccttccgggttcaagtgattctcctgcctcaacctcctgagtagctgggattacaggcacgcacccccacacccagctaatttttgcatttttagtaaagacggggtttcaccatgttggccaggctggtctcaaactcctgacttgaggtaatccacccgcctaggcctcccaaagtgctgagaatacaagcgtgagccactgcggccctgcctaaaaatacttatatactcatatacacacatatatactcatatatacacacatatatactcatatatacacacatatgtatactcatatatatacacatatatactcatatatatacacatatatatactcatatatatacacatatatatatactcatatatacatatatatatactcatatatgcacatatatacactcatatatatacacatatatatactcatatatatacacatatatatactcatatatatacacatatatatactcatatatatacacatatatatactcatatatatacacatatatatactcatatatatacacatatatatactcatatatatacacatatatatactcatatatatatatatatttttttgagacggagtcgtcgtcttatccaggctggagttcagtggcgtgatctcagctcactgcaacctccgccttctgggttcaagtgattctcctgcctcagcctcctgagtagctgggattacaggcacgcatccccacacccagctaatttttgcatttttagtagagacggggtttcaccatgttggccaggctggtctcgaactcctgacttcaggtaatccacccgcctcggcctcccaaagtgctgagaatacaggcgtgagccactgcggccctgcctaaaaatacttttattgcttactttgtacatgtgtttaatttcttcattataatcctctaatcgagtggagataatggaagcaaaatgtaccaaatgctcctgttttcaaactttctggacagaattcctaattaccaaaactcccaaggtgactgcttatttcatccctgccttcctaccctcccacccactgaaggcttctggccctgtgaggagatgggcaggtcaggagagccattgaagtagcaggctcctctgagtgctctaaacccatgaggcactgagagaggggccagcccatcagccttgtcccatccagacaggtttttcctctgaggagcagtgctgccatggacaagatgggaaaccggattctcactgcagacagagctttggctcaatgctgcttctaacccaggtcagcaggagaagccacagtcggcaccatcaggaagctgtcacacacttgaaagcttacattcgccttttcaccccataattttaacttttattttagattcagggtgaacatgtgcaggttggtgaccagggagtatagagtaacactgaggtttatggtatgaatgatcccatcccccaggtagtgaacgtagtactccataagtagtttttcaactcttgccctctctctccctcctctttctagtagtcaccagcatctgttgttgccatctttatatccatatgtacccagttcttagctcccacctgtaggtgagaacatgcagtatttggttggttgttcctttgctaattcatttaggataatggcttccagctgcttccatgtttctacaaagggcatgactttgttctttttcatggctgcatagtattccatgttctatatgtactgtattttctttatccaatccactgttgatgggcacctatattgattccatgcctttgctattgtgaatggtgctgcaatgaacatgagtgtatgtatctttttggcagaacaatttacttttctttgtgtatataaccagtaatgggattgctgagtcaaatggtggttctgttttaagttctttgagaaatctctgccttttgtatgttttagtattcctgtgcatggcattgctgtttgacagccagacatgttcctccctaactgctccccaaaacattgcccaagacagagctgagtatgtcatgtgtgccctggcatctgattactatttgctttctttgcattaaactttcctttccataaggtggatattctatttctaggacaatcaaatacagaatgggtactcggaaaccctgtggaaacttttctttggtcaaatgggtttttgatattgactataccttcacttctgcgagattaaaagaatgcgaacctttctacaattaacttcctgatgtctccctctcctcctataaactaaaggaaattctctgtctaaacaatacttgccttttgtctttctctcaccttttgtgtgtttaaaatatccttattttttaaaatcagggtttttaggaaaaaattttccatttgttctttttttcctatttatgttactttaccgcattatagtgatactgaaataatgatcactgtattgtaatgaactcccatactaaactgcagaaaactccattgccccagaccctcctctatagcttttgacacagatactacagacagaaatactacaacaggagccacaactttttcttttttttgagacggagtctcgctctctcacccaggctggagtgcagtggtgcaatctcggctcactgcaagctccgcctcccgggttcacgccattctcctgcctcagcctcccgagtagctgggactgcagatacccgccaccacacctggctaattttttgtatttttttttagtagagacagggtttcaccatgttagccagatggtctccatctcctgacctcgtgatccgcctgcctcagcctcccaaagtgctgggattacaggtgtgagccaccgcacttggcccagagtcacaactttgactaccataaaaacttgaatttcatcctttgcttgtcattttaggtcttaatcatgttccttctgtcatttctcaggtccttaacatgaagaattgagattgtctcttgttaggaagaacatagtcttcctgcaggctaagtcaagcatagtttcagtgggtctgatcagggactgatttcatgccaaaccacatattaaaatacaggaactttatgtttttactgtgacagtactaacatggaatcagatatttttattctgttgctttagccctcagctgtgcacacatcatctctattattttcaacctttctgtaattagaataaacaattacaccaaggtcactttgacttcggcatcaaagaaatggtacttttcggggttttgctcatggaatgttttaacattatatccttttatttgccaccagaataaagatgtaaaggttgaatctaagaactgtgtgagagttaaaaaagaaagtcaagcatagaacaagggaacaaatatgtttttagtatttctccttttttctctctgcttcagttgaccagaatctctccttatctggacaggttaccctaagaaggagctttaataatttgtatcttcgagaccaacctggccaacaaggtgaaaccctgtctctgctaaaaatataaaaattagccaggtatggtagtggggtgcctgtaatcccagctactcaggaggctgagtcaggagaatcacttgaacccaagaggcagagactgcagtgagctgagatggcgccactgcactccagcctgggagacaaagtgagacttcatctcaataataataataattattattattatttgtatcattattcctagcagagtatttgatacattttgtacactctggcaatagtaaatagtggagtctaagaatttcctgcagaacaccaaacttgtattacgggtgagattatatggcctctttagctcataaaaaagaatggtagcctatatttaggtttagtgggttctacataaatccatgcttgctgactccttgtggctattaagagaatgcttaaatatattaggggcccactgtttattaatccctcatgaatcctaagtctggtcactgtagagaggctgctggagtggatgaatatttttcaagccagtttggccttccttatatcattttatattgcccaaggaagggtataggaattctaagtggcatatttatttctccatctgctgcttggatacagctctgaaaaccttaaacagatttcccccccctcagagtatttgagagttttatttttttccccagcacagtgaggtattcattactcttttgggattttattagacaccatgtgttaatatgggagcttaataaatattatctaaacagagtcctttggaagagagatatatacttattacattgatggcccaacttatgcaaactgtttttttggataacgaaaaccttttcagagtatgggtaattctaagatgcgtattaaattacaaatgctctttattagttagaaaatgagtcacaaggtaacatgtataccagggggctagcatttaagatttataaataattatatttttacacttaggaaaagtatttacttacaaagttaggacatgagttacaaatcacagttgaaaagtggcttgcagtttcacagaatttcttacttccagactcgtgttattatgcctggtgacctcgacatcaatttcaagtcttcatttaataccctagtttctcaatgattttttttttttttttgagatggagtctcactctgtcaccagcctggagtgcagtggcgcaatcttggttatataatttgatttaactatttttattttgttttattttattttttgagacagagtctcattctgtcaccagcctggagtgcaatggtgcaatctcagctcactgcaacctccacctcccgggttcaagcaattctctgcctcaggctcctgagtagctgggattacaggcccccgccaccacgcccagttaatttttgtattttttagtagaaacggggtttcaccatcctggccaggctggtcttgaactcctgacctcgtgatccacccaccacggcctcccaatctcaatgattttttagtagtcatttcctccttaccgtctcagtcagccattcacatggttggttacatcttaggttgtattattagcaagaacagcatcacctgcgtaccgaacattctgtgtatatttcccctactatgccgcctcagtaattcttagcccattatgtggaattccatccactacttttaaaaaatatccaccactcccttcagtcttctgttcctactttgccccacttgccttccatggtctgtgcttatgtttgcgtccttgactgagtccttaggtagttacctaatggaaatgactgaaacgtcttctgaggtgaaagtagctaggggaaaatgtcagagctgtgctgacccatttcactgtaaattcaggaccacacatttcacataggtgctcatcacggcacagccatcctcctacattttcctaaagcattgactttcctactccctgcaaaaggcctcttcattccttcttctcttaaacctcacatccccttctgcaatcacactatcgtctaggttaatggttttgtctaatacttcattgaagaaggagaagacgacaacccagagagtttttgtttccaacgttaaatctgaaatgctttctacctctgtgacaatagtttctgttgtccctctgaaaatgtctctgatctaatccaaggcaacccctgtgtctgtgccgtggcttttatgatcatcgcctttttctcctgcattatcaatatttccctttctgtgggatcttttgtggcagtaaacaaacaacctagcaaacaagaccaaaccttaccttttcagtctctgtcaactacagtcttaatgcttagttttcctttataatgaacgtttccttaaagagttgtccatactttttattgctaccttttaattcctgtaaacagctttcgttgtcacttaagtccatatttattttgatatatatcatatataaaatagataaaattttatataaaatagataaaattttatataaaatagataaaattttatataaaatagataaaattttatataaagtagataaaatacaaaatatatatgtattctttaaagaataataaactgaacccttatatacatatcaccagccaaagaaatagagcatttctagaacatttgaaacccttgtaggtatccctccaatcttatccctcttccaccctaccctccgccctggatgtcatcactgtcctaaattctgtgcttctatgcttccagattctcagttctgttccattggcatatttttctatccctgcagtaagaccacattgtcagaatcactttagccttgttaggagtcttgatatatggcagggaaaatctcacattattaatctccttcaggaggatcttgactattttctggcccttttgaaatacatgtacaatttagaattagcttatcaagtgacacacacacaaccctgctgggattttcagtgtatctaatagatgggacactttggtgagaatgaaattaagttcttttatccatgaacaggagtatctatttaattagatctttttcttcgaactttttattgtgaaatttttcaaaagaagtaaaatgattactcatatattccccatttaaattcaacagttgttaagatttgccaaatctactgtgagtataatttcccccttttccctttgatcatgaattttcagagtaaagggttggtgtaacagtctcttccagtgatgacaaattgatttaacaaaacccatttgaaaatattttgcagacaacatgatgcttcctctacttcccctaaaaatagggacaatgtctacaaaacattgtataatacctgtacatcaggaagcacatagtcccactacttccctaatattcagactatattcaaatctcaattgtctcgaaattctattataaagccccttttttccctaaccagagtacagtcaagagccatgtattgttacttattgatctgtttttttagcctgttctagagaagttctgatacacttatttttatggtgttgacttctgcagctcagatgtgttgttgagtgctttgtattctgaatttgtctgaatatgactttgtgatgcttgggacacatttgccttgtttctccttcctgtaaactgaaggaaggcctgcagactggactgggttcaggtttgctgtgtgcccagcagactgggtaggtgatgctgtgtacttctcagtgcgtcacatcaggaggtacatgacgtcaggttgtcccactgttactgatgctcacacggatcacttaattaagcttgtgatcaccaaatatttatattgcaaatgtatcctgttttcctttgatatgagcaagtcacctctaaggtaattattttgggtcgagttgtgtcccctgtcaaaaagatatgttgaagttctacccccaagtacctcagaatgagaccttatttggaaataggatctttgcagagataaagttaaaataaagtggttagggtgagccctaatccaatatgactagtgttcttataaaatagggaaacttggacacagagacagacacatgtagggggaagatgatgtgaagagacacagggagaaggtggctacctacaagccaaggagagggtcctggaatggatccctccctcagctctcaggaggaagcaacctggtcaatgccttggtccctgaacttctgcattccagaaccaggagacactacatttgttacttcagaaatacactcagtgtatggcatttcactacagcagctttgaaatacactcagtgtatggcatttcactacagcagctttggcaaactaatacagtagtatttggcaccatgcaaatacctcgttgaccatcattttctgattctagcatttcttctacatttattttaaaaagctttccctcatcatctcagaataaagcacaatttctcctgaaaagttagggtaaatgcttacttctttccctttaatttttgatttttagtgttggggtgatcagacccaacaccaggtcgtgggggtgacaaagtccggcggagtcaaaggattgagaaaaagacagtttgagagagggaagtgggactagggagccatcgcaatcatggaggctgcgaaggccccaagctctgggagcccatgctatttattggtaatccaacaaagaaacaggtggtgagaatgtggaggtggaaagggcaggtgcatgatccatagctgtgagtttagcatttatgaggcacatgtacttgagataatggtaatacaatcgatctaggagcctaggagggctagaagcaaggagccagcaagtctagacacattccagaggacattatgcaagccctgcctcagtttccctcccaacactcagcttttccccaacattttagaataaggaattggtgtaataatgatactcagtaatgaaaattttcatttttcttttcttccctttgttttttgattatcactggacttacagatttttaatttatttactgtttatagtgacttatagtcattaagtattccttttgctactcaaagtgtcccgaatttggttggtgattttaaactgattcttggatccttttgacatgttccagtggttgttgatagcttccttgctttttggcacaaaagaatatctcaggctcacctggtacttttccttcctccgactcagaattcgccatgtgtcctactgatgaatatttatttcccaagatattactactagcaagaatcccatatgaacaattttttgcatgtgttgtttcttttagtgaaggtatatcttcaaggtagatttccagagagagagtactgcttcatcaaaaggtaattcaaattttttattttcatcctggagattcttttaagaagaaaaatgatgttaaggagaaataggtggtaacccaatcacaccaagagaactggctatccaaacaaatgagatcgtatcacatttcacaaaacgcttgctacagtttgcgtagattgtttgtatccaaggcagaaatcctggagaccatgctgaagtgtaaatgaataagacgaagcgtcattgtggcaatgttaattcacttggaaggcatatcccaaaggaagaccaaggaattggatttagccagtggatacaattctttaatgttctggtgttggatgaagcagaaatttttggacacgaaatttgatgtgactatgaataccattctaaaatttttgccaaagcagagagaatacatctttcaccagcccctcagaactcaggaagtggaaaagctgggatccagtctggatccctgtgaggggaagtggctgtagccagcaacacatggaaactcccagccacctgtagtttctttcacctttgttacccagtatgtacagaagagaatgtaatttaatggtgcgttttcttctaactcagagccaggaaaatcatctggttatcaatcagtcattggaactggttggaatattgtggaaagactctggtgatcctgagaagattataaagataacaagaaacacaaacacaaattctgcaaattgcaaagtggaatcttaaagtccccagatgcagtggctcagccgttgccgaagtcagcgggattttgcagcggattcctctagcaatgcaagtgctcttgtgttgggactctgtgtcaggcagcctgaggtaacagtggaagccaagtgcttggatttttaccttccagaagtacatacaccagtttccttgtattttaacaaacaagcaaacaaaaacagtacatggaagaaacctcaggaaaatgcagtgggtcttttccaaagtcctgccagtccagagctgtgtttgaaaggcgaaagatttttgtgtcatatgcttaagattatgcaaagcctgaatgcagcctcgtcttcaaattaaagaatcttgatttttctagtcttggtgagattttgcccttctaaggatgcccaaaatgctaggactaaggggaaagtagtctgcagattttgtatttataaaaactgacacagccagctttcatttaaagataaaattagacaaaagcttaggcagaagcttctgctactgcaaagaaaagaaaaaatttaacagaaaatgagggagaaagatatttataaaaataaagcatggtccaagcagaagctgccactccccctagaaaaaggaaaagaaggaaaaaaagtaaatgaaaaacaaggaaaaagagaaaaggggttttgatataaaaatgaggacatagacaaacttcttaaatatactaaagtcttgaaagttaaaaataaattgaattaataaaggaaacaatttgagatgtcatcgttacactttgtatacgtgtgtcaaaatatcacactgtttcccataaaaatgtacattgattgtgtcaattaaaaataattataaaagcaaaaataaattttaaaaaatgagaagtaattactaatgagagatgaaaaaaattcaagataaaaaacgtgggactctcagaactgagatagaatcgctgattccattccagcagctgctaagcatgagagaaagggaaagtgcaggagaatgatgtagtagatctacatttgttagacagctgacatttgtttctaccacaaatcaaaattcaaggaagaagctaattctgtcctgaaagctatcactttaaatctaagagaaatgatttttacacctgcaaatattttgctaaagacatatcagtccttgaagacatttaacagaagagatgtaaaacctttttggatataattaataaccatcaatatttattttgatgaaacatatataattaaagctctcattttcctgagggtgctttatacctatttttaatataaaatactaatgtaataaatgtcttaactgttttatatgttttcaatcaggaaggtttctcctgataattagttctccctaccgttgccagaaagacattttccattcattgttcagtgcttctccaaccttccttaccacaccagtaaaaatgcttttatcaagctctttctacaatctccttgaagccaagtctgtcaggcacttctctttcttgatttgacagcttagcaacttggggcagagttaaatgttccctcctgcttgaaacactgtattttcttagcttccaggccaccactgtcacctaattacattcccacctcacagtctctcctgtctttctgttcttggcacatcctcctctgacctacctctctctgacacagtgctgtagggcttggcctcaagctcacttttcatgtgtatctccattctttcccttgatgatctcttttagtcccacaatatcaaatgccatgttcaatgcagccaatgatgtcaatcttcacctacttacttggcatggcccattggatattaacaggaatctcatataaaacttccaaaatacaaccctcgataactttcacctcattccaaacctcttctatgttcagttttttgttttgtttttttttttttttgctgtcaaagtctccgctatcagttgcctgagtcaaaccccgggaatcacccactgtttctcctttccctcacacccaccccaaacagccaatgcgtcggctacctctccagttctaactccaagacaaattttggattctgtcacttacttttatctcttaagtcgtttgtctcttttctgaactggtgaataggtggactcctagctgttcttctggattctactctcgtccttctcaagtctattctctgccaacagccagagcaatagatctgaaaagtttaagcacccttcctattttcctcccctaacacttgttggaggcacccgtgggtttggagttaagtggggaagctgtttgagggaggcaatagtctagcaggttggaagattgattatatataggggaattgaacaaatatatacaaatattaaatatactgggagccaggtttcttactatcagtgaagagaatttttacaaaaataaaaaggagaagtgaaaaatgaactttggatgtgaactggaatttgagatggtgggaacccatggttttaaagttcttcaacttttattttaagttccagggtacatgtccaggatgtgcaggtttgttacatgggtaaatgtgtgccctgtgatggcttgctgtacagatcaaccatcacctaggtattaagctcagcattctttagctattcctgcctccttccccctccctcacccccaaccacctataggccctagtgtgtgttgtttccctccctgtgtccatgtatcgttcagctcccacttataagtgagaacatgcggtgtttggttttcttttcctgagttagtttgccaaggataatggcctccagctccattcatatccctccaaaggacatgatcttgttcctttttatgactgcataatattccatggggcatatgtgcaacattttctttatccagtctatcattgatgggcatttggattgattccatgtctttgctattgtgaatagtgctgcagtgaacatatgcatgcatgtgtctttataatagaatgatttatattcctttgagtatatacccagtaatgggattgctgggtcaaatggtatttctggttctagatctttgaggaattgtcacactgtcttccgcaatggttgaactaatttatattcccatcaacagtgtaaaagtgttcctttttccatgcaacctcaccagcatctgttgtttcttgactttttaataatcgccattctgactaacatgagatgacatctcattgtggttttgatttgcatttctctaatgatcagtgatgttgagcttattttcatatttggccacatgaatgtcttcttttgagaagtgtctgttcatgccctttgcccactttttaatggagttgtttttttttctcttctttcttgcaaatttaagtttcttatagactctggatattagccctttgtcaaatggatagattacaaaaattttcttccattttgtaggttgtctggaactcatggttattaatatacatagatagataaatgtcaaaataaatgcatgatatgtgcgtttatttcctagctttgtgctttgagagggtttgggagaagcaacaccccaaataacattgagcattcttagtacttccatcttggtttctaaataatattttccattacagaaaacacaggaatccttagagggaagactgtttctagggttgcagcagtgatagtatgaggtgtgcctggaacaccttgtcgtgccataaagtaacacaatagctatgcggtgttgttgaaaggaataacctttccactgaaatactccaaaggcagaaaagagcacattgttactcccaggagcttcccattgtaagtgagaaattttgtagttgtctcgtgtgttgtctaaccttcatattataattttactgtcaccatattatgaaaagtgaagaatttccctaaatgttagctctctttcatagtttgcctagaaatgtcatcccattggtttgccatagaacccccaaatgccctggtattctaaagtgtcctcatgaaaatcacagataatacacttgttcttaggctaaaggccaagaagcaatagccacagataataaatgaagtatgttgtataatcttattaatacccattaatatgttagtgtggatccatttgtgtgggttttgttgagaactgaagaaaagctggggctgtaaaaggtaaactgggtcatagaataaaagcagatgcttggagcaataagtaaagtgtctcagcctctgaacataactttttgcataaatatattgggaggacagtaaaaagtggattgggacgtatactctccctgaacttaggggaagtaatataactgataaaagaggtcaacctgtcagaaaaagaaatagccactgcaaaaaatggaaactgcatgtgtttctgtttgatctaagacagcgtaaaactcaaagtttttttttttaaagtagtaaacaaaaagcaatgaagagggctctgctgtaactactgtcgattgtatgcccataaaacttttcctggatgctattgtgctcaaggttcatgtgaagatttgcacattttatgtttcttggaacacagtttttcccttcttccttagatctgatatgttagcaatggctggtggtgcccccattcccaaatttatacacatggctttatttgcacaaacctttgacattaggcagggtgaaaccaggtacgtgcagagaagaataggccaagagggtaaggagtggacaaccaaggtcctggtgtgctctagcatgtgagccatctgaagggtagctcagtagattataactaagaacatagattttacctgggtacgcaagtctctgaatgtgggtggcctcagtaaacaccatagacagaatggcaaactccctgttacatttaagttgagtggaagcctcgttactccatgtctgccactgctggacagatatattaagctagttgcttcctaggcaggagaagcagaagtaccatctaaaatggtaagttttgcctattggaatgtggtggaaaagttctgaagtgtgaaagactaggaatgagaggagagggaaccaggggctcagagaaaggctttggattatttagggagagacctaagtaggaaggaaaagctgataaagttcaaaccttccagttgttggttgttttccttttttcttctctctcttttttttaacgtattttttattgttttatttttatttttgagagtctcactctgtcacccagattggagtgcagtggtgtgatctctgctcactgcaacctccacctcccaggttcaagtgattctcatgtctcagtctcctgagtagctgggattacaggcatgcaccaacacacccagctaatttttgtattttttgtagagacagggttttgtcgtgctggccaggctgatcttgaacacttggcctcaagtgattgacctgcctcagcctaccaaagtgctgggattacaggtgcaagccaccatgcctggatggtttttttaattgttttttattgtggtaaaatatgtataacataaaatttaccattttaaccattttaagtgtacagttcagtagtattaagtacattcacgttgttgtgctgtcattgccaccatccatccacagaactcttttcatcttgcagacctgaaattctatacccattaagcaattgctccccattcctcctttttccctagcccctggtaatcactgttctacttttttctctttgaatttggctacactaagtacctcgtgtaagtggaaatcatacattatccttttgtgtcaggattatttcacttagcgtaatgttttcaaggttcactcgttgtggcatgtgttagaatttccttctcttttaaggcagaataatattttgtcctatgtgcttatcacattttgtcgatccattcatctcctaatttgagttgtttctacattttggctgttgcaaataatgctgctatgaacattgttgtacatttctctgtttgagtccctgctttccattctttttgatgtatacctaaaagtggaattactggatcataaggtgatcttatcttaaatttttctgagaaaccaccacactatctttcacagtggttgcaacattttacattcccaccaacaatgtatagggttccgatttctccacctccttactaatatttgttattttccgttttttgtatactggctgtcctaatagtgtgaagtatctaattgtggttttgatttgcatttttctatagtgatgttgaacatcttttcatgtgcttattaatcatttgtgtattttctttggagaaatgtccattgaactcctttgctcatttttaaattgagttgtttgtattttttgttgtttgttttatttatttatttatttacctgcttttttcccccatgagctgtacatgtttgggatatcaaccttcctatgtgaggttgtactgggaccagggtcatgtctctatctagagtatgaaatcgtattgcttagactgagtggcatggcgtccaacctcagaggcttttgttggaagaagctgtgtttactattaaagaattaaagaaatgacagatgccaccagtgaggaggaaacaaaagaagacaccaaggtccccagtcccaagcggaagttagaagaaccagttttggagttcaggtctccctgaggagcaatcactcaaccactgaaaaagctgaaaatcaatgattttaaggttcacaagtgtgccgtgtgtggcttcaccactgaaaacctgctgcagttccacgaacacgtccctcagcacaaatcggatggttcttcctaccagtgccgggagtgtggcctctgctacacgtctcacgtctctctctccagacacctcttcatcgtacacaagttaaaggaacctcagccagtgtccaagcaaaatggggctggggaagataaccaacaggagaacaaacccagccacgaggatgactcccctgatggcaccgtgtcagacagaaagtgcaaagtgtgcgcaaaaacttttgaaactgaagctgcctcaaatactcacatgcggatacacggcatggccttcatcaaatccaaaaggatgagctcagccgagaaatagccacagatgatccatgaggaaaatccctgtccacattggaataaaaaagacatttttgttacaaaaagtttgcagtgggataatagaattaacagtactgtctaggctgttgcaatatattctctttcaacgtaccttccttcacctcgtcgtatatatcctcgataagtattaaaacagtatttgcgtttaaaagagtttgtatatatttaaatgaacaactttttatactctttgttacatgtttgtatcagtatttagtggaaaaccatttgagttgttttgggttagaatttttctttttgtactgtttctttaaaacagagttcttagtaacaagggcagttcctgaattcaaataaaccattttgtatgtttggattttgaatgggttaactaattacaggctaaaataatgccttttttagtgtttttaattgttagaattcactacataaatagtaagtaattgtgggtctcaaaaacactaggaacttttaagtgtctcagcacttcctcgatgtgcctgccctcaggaagtgagttcacatttgagacaactgcactccagtgtgggcgtgcctttgtcttcaggccacgccgaagggtgtttaaagcagtcttgcaggttgctcgtttcccagccgtggataaaaactgaagccaggaatctaataaggaaggctgatttcctcagttccattttgaggaatggggaaggctattctaaagaaaaaaatgggacttgttttctcagcagacctgcaaggctggctttaagagcacaaggagggaaagtaacgaaagggctggactactataaaagttgcaaatacgtagttagaccaatagatttatataatcaggtttttgtcatgtaatttattaaatatgacagaaacacaactaagaatatcaagtatttctctggctcttgacagaaaaaaatcagttgacttaaccctttgctgtcaaaagagttggcgtttcctgttctgggtgctgctgccaaatgttctggtacttagagttgggatgtgcaacttcaaccaccgacttatcaatgcagccgcctgtgtattgcaattggctgttaccttaagcactgagccacccgggtttagttcagccatttcaagaagtatatttaacgttggtagttctgctttattaaaatgcagcagagatactcttctggcccttccgtttatagttctctgagagagttctattttttggttttgttttgtgttttcttttgcattttatatcttgtatttatccctcaacatgttttgtacttatttttttaagtaaaggaattcttttgtgtatatatagatacttgcatgatatactgtagtcaacgttcggttcctcgaaaggtcttgctgctgtcaggtgttatgcactccatccatcataactgcatgaaacacatttcatttgtagataaacgtgggacatttggcccttgtaaaaaaaattaaagtctcctctgggaggcaagcagttatgaaatcccaatttgatgcccttgcagagccagcagggctgctcagacctttctaaagaaaactggatagcacagctctttgggtttgcctgagaagaatggggggactttaaaatgaggcagacggcacggctgactgactgcacagtggcatccaaggtatagctgccagaatagcaccattccctccagatgcagccgtacacaaacctctagcctgttgccactacctgcagactctgagggagaggctaggacgtgcttggtagggacaggctggatggttacgcagctcggggatattgaccaaagagagagggttaggatagatgagagcagggaatgacagccaggtgtgcaaaatggcattgtaaactgtaaagccacagggaaataggtgctggtgattgctgtccctgtgtgtaaaactgtaggggccaaggcccttgacccctgaagctttgctgaaaaaaatcaactcacaaaaggcagattaattagagaaagacatacaaatttattgcatcaacacgggagcccctcagaatgaagactcaaggatatgctgtaaattgtccatttttgtgcttaagtttaacaaagtatgaacagtgtgtagaaatataattagacaaaaagggtaagatctaatgctaatagatggagagaggaaacccagcaaggcttgtctgtctagattcttcttggcctctctgtgtaacgtttcttccttctgggtgtggggcagggctgtctctggaaaggggtcttaacacccacataatttctttatggccagtttttacacagaaaggcaaaggggaacgttatagtaatatttttaggtttcatggctggctttaggttctggtttctttagtgttctggtttctgtgacaagccctgggggagaatggtattgagagataggcgagcaggtgaaggtcaaagaaaaatgtttgcttctctgagggcttcatttagggatattgttttctgagccacaagaaaaccttggtgatgaaggaaaatgtcagcctctccgatcaatggaggaactgaaaaagcatttctcccaggaaagaggaagaacgcgtatgtaaaccatgcctaccgttttccttttcctggttctgtgatcttctaataacttattctgtgttttaggagttcaggtggtttgtgttgcttttgagggcataataaatatgtcgtggtacaggagcacaaagaattgacatgcaattgctatcaatgactgaaagagaggaagatgtatgcacagcctgacagcaactccacagacctttctttcaccttgtgaccgtagtaaacctgcactctccttgtagatagtgatggctgtatgaacagcgaccagagaaaactttgtggctcaatgtggtgctttgttccgacattcttttttttttgtttttattatactttaagttctagggtacatgtgcacaacatgcaggtttgttacatatgtatacatgtgccatgttggtgtgctgcacacattaactcgtcatttacattatatctcctatattatatatatatatctcctaatgctatccctctcacctccccccactgcacaacaggccctggtgtgtgatgttccccttcttgtgtccaagtgttctcattgttcaattcccacctatgagtgagaacgtgcggtgtttggttttctgtccttgcgatagtttgctgagaatgatgatttccagtttcatccatgtccctacaaaggacatgaactcatccttttttatggctgcatagtattccatggtgtatatgtgccacgttttcttaatccagtctatcattgatggacatttcggttggttccaggtctttgctattgtgaatagcgccacaataaacatacgtgagcatgtgtctttatagcagcatgatttaaaatcctttgggtatatacccagtaatgggattgctgggtcaaatggtatttctagttctagatccttgaggaatcgccacactgtcttccacaatggttgaactagtttacagtcctaccaacagtgtaaaagtgttcctgtttctccacatcctctccagcacctgttgtttcctgactttttaatgatcgccattctaactggtatgagatggtatctcattgtggttttgatttgcgtttctctgatagccagtgatgatgagcattttttcacgtgtctgttggctgcataaatgtcttctttgagaagtgtctgttcatcaaaaactgtccttcgcccactttttgatggggttgttgtttttttcttgtaaatttgtttgagttctttgtagattatggatattagccctttgtccgatgagtagattgcaaaaattttctcccattctgtagtttgcctgttcactctgatggtagtttcttttgctgtgcagaagctctttagtttaattagatcccatttgtcaattctggcttttgttgccgttgcttttggtgttttagacatgaagtccttgcccatgcctatgtcctgaatggtattgcctaggtttcttctagggtttttatggttttaggtctgacatttaagtctttaatccatcttgaattaatttttgtataaggtgtaaggaagggatccagtttcagctttctacatatggctagccagttttcccagcaccatttattaaatcgggaatcctttccccatttcttgtttttgtcaggtttgtcaaagatcagatggttgtacatgtgtggtaatatttctgagggctctgttctgtttgattggtctatatctctgttttggtaccagtgccatgctgttttggttactgtaatcttgtagtatagtttgaagtcaggtagcgtgatgcctccagctttgttcttttggcttaggattgacttggcaatgcgggctcttttttggttccatatgaactttaaagtaattttttccaattctgtgaagaaagtcattggtagcttgatggggatggcattgaatctgtaaattaccttgggcagtatggccattttcacgatattgattcttcctatccatgagacattcttacactctacctggctccacaaagcagggcttttagagatcatcctgctggtgtgtggaaatagctgtgctatgggcatggcttatgatgggcttttacctgagtctttgaaaaaacagataaatttaaaaaataataatgatgaagagaagggaaatttaggaatatacaggagctgcaggctacatttttattccttcagtgatgtaaggtcctctacatcttcaatgagaacacacggacacagggaggggaacatcacacaccagggcctgtcagggcgggggtgtggggagggtggtaggagggatagcattaggagaaatacttaatatagatgacgggttgatgagtgcagcaaagcagcatgacacatatatacctatgtagcaaacctgcacgttctgcacatgtaccccagaacttaaagtataattaaaaaaaaaaacttttaaaaaaagcaggcaaaaaactaaaatgtttttcttcctctcttccttctaccactgaggtcactctatattataagattgcatttcattatctattgcctcaggatgtcatcatttgtatttctgtagcccccttgtaatcagagaagagggatcatttcttctgcagggaaagccccatgcaagctctgccctggattgggcattgaatcaagaggaggtttgggtgtcagggagcattgggagatttgaaagaaaacaagagcaatggtgggtttggaaagtggtgaagggataaataaaggaggtccagagagagagagagattgaaagaaggagggggataagggatggagaaaggagttagggcagaggtgatagggaaaggtgttttgatgattcagtacgcttctgttcatcacatgtcttcccatgttaataggaacttcctaaaaattagtgctgtcttgttaagtagtgagcttttggtagcttgtagcacccaagcagagaaggaagatctcatcagtcaggagtgcagaagctcaggtgtctgtactgacggcaaagttagattagatggtttaaaggttctctctcaccctaactctaagcctctctcagtgcactcttataaaagtgtgtgcgtgtgtgtgttccttctaaaataaggagaaacggaacactagtgctactaaagataaattttgcttcttcattacttgccagttacacccgaagtcaatcctaactttgtctttgctttttaatgagctcaaaataaagattgttgggttttgtcagcagtgtttttgccccttaactggatgaaataccaacctttgcagtgaacagaaaacaggtaatttagaaaaagaaacataaaacaatcataactgacagacttcagaataaatctcctatcacagaaagttgaaagaacttggacttattttgatatattgcaagagtcaaagccttttcaacttgttaaaaacagagtgcagaatacagatggccaaaatagccctcaccttatcaaagaccagttggcattttgtcatttttttcacttttatctataatataggggagggggatagagaacatgaaagcgtaatttttagctgttaagtattgactcttcctattgacattgacagtgtgttcttgtgcattcactaacattcaaaatagcttatttcactttatagtgagtacagagggaatccctaattctctactgcaggaatgaggtgtgcatggaaggaagggtgggagacaccagaactggtctactcaagtggaactcttctgtgaaatgggtcacaaacacagccattaatgccccctcccctggcccctggctcagccctctgtactattagaatggcacatctattctgtctgcatctctctctctctgcatctctctttcccctcacccctcacccgtaaggtccttaagggcagagactctgttaagagtgaggccacatttctgaattgtcagtattataagcgcagtgcatcataacaagtgttagatgcccacagagtattttaaatgggatgaaacacatttttcttctcttgcctcatgccaccagtggctgcatgtagaaagcaaggaactaaataagttcatttacttcccaagggtctcttccaccctagccctgggtgtgcttgacttcaagtcacagactatcactgcagaccgagagtgcctcttctgtgccatctgtcttttgcaaacttaatggctctttttgtttgttggtgtgtcagttcaccaatcattggcaaagaaactaatacacaactgagtcaccagtgttctactcccagaagttttcttatccagaaaaacataaaatggagggttgaagtagatgatctctgggtattctctgtgttcggcagttctgtcattctctagttgtcccctgtaatttgtgaaacttgggatagtatctacctctgcttagtaattggaagaactttaagtaaatgcagaccacccggggtggtggtggttagtgctcagctgtgtcttaggaaaattgaactatggataaataacttgccttgagatggtatagtccaagaatagacagctctctttctcattgctataagagacagttgagattcagggctaatgtaaaatatccagattatacagaaaaatgcagagcaaaccacgaacatcttttacatgacaactcctctgacctcacaaaacctctctcttcctgatagatgaccactgtcaatagttttatgtgattccattgaatctttgtttatttataaacatacgcacattttagtggcttcacaatattccatagaatcactgtattgtaggaatcctctattgattatttttcccatttttttcacaaataatgctgcagtgaccatccttgttgttatatctttatgcacatatgtaaacacttctgtaaaattaaatattggaagtagaatttctgagtcaaaatatgtacatttaaaattctgataaaaactgccaaattgccatgtaagcaagctctgccagtttgcatttttaacccaatgcctatttccccaacctccacccattacagttctcaatattttgaattgtttccaaactcatgcaaaaaagatgtacttgcttggaagacatacatttttcactattaaagttttcctttctatatttctttgaatattgacagtcctacattctcaatgttctttcattgaggaactttgatctgatggatgctggcttttctggactgattctctggttgtcttgagttttatcctttatacccatatttgttaggactattgaaagagaaactgaggcacattaaatatgaaagagtttatttgagcaaacggtggtgacacaggagatagaaagaaattattttaggcagatagtgagggcaaaagagtcctcggcagaacttcctttctaacaaaaagcaacccaagaaattaattctcttctaacaaagggcatcctgaaagatggagctgcaaacacaaataaggaagctggaagcttgcacgggagaaagcctgcagctacaccaatggaaaagtcctacctggcggccaggcatgttcaccatggggctccaccttccctttgttgttagcacatgtacagtaagaaatgggcaacatggagaagctcaggcagagaacccacctgcataataaaagactggggtggagactgtcagagattcatgccctatgcagatgccacacctggtcctaactggtttttcatgccctatgtagatcagacaccacctctttactagctcatctataaaaaccctgcatttcactgcagattggcaactcatttttctgggacccctctctgtagcagagagctattttctttcttttgcctattaaatttttgctcctaaccttactctttgtgtccaggtctttgatctccatggctatgagacagtgaacgttgaatgtcaccccagacaattgaggctgctttattggttcatgaattgggcagttccagaatgcaggtggttcagggctctgatgaaggggaatgaaggagaaggcttttatagggtgaatacgggagcaaggcaaagaaaatatttggttgtttacagtggagcagtaggtttagttgaatcattccagcaaaagtcccttgttagaggttggccatttctgactgaataagcttaagtgttttgttgttgttgttgttgttgtttactgtttacaatgagttgagtttcagtttgctgatgcaggcagtggaattgcctcagtctaatggccttccaattattttaacaggactttgtactttttaccttgcattctggaaaaattcctttgattcaatcaagaacataaatttactttcaagttgtatccatttgatattcagtccatccactgaggtttataattcctaagatctctaactggtgaccttttcataataatctcttctgatgtttcactggggcaacttctctcattctcctgagaacttgactcttattttcaagggttcacctgtgtcctctgttggctttattttctccagagtttgtttttactgctgggttcagtacctctttcgtgattttggcttttctcaaatttttggagatgtttagttacctgcccacctctatgtttgcgtattcctatttgcatgtctctggatgagggttgtgcataggggttcgtctccaggtttcataggagagactgagtatgctgctgagatgtgaggcattcatgtgctagtagtgcccttctgggagttctcactctctgaggaaattgccctattcatttgtatttgtgagttaaaacatgtctgttttgtgctgctcaacagagagggcagaaggacggggtaggaggaaagggatgactggcccatcagctccatatacagtttcccagctcatcattgtgccagtcattccagagctctttccatttctgtctctctgttgcctctagacttagagctctacttacattatagcagtttgaatttttctatgtgtgtctgaggactcttatctccttggtcaatctaatttccactaaatctttaaaatttcttgtccataggtggtactccttttagttgtcaacattcattataaaattattatgatattactgtacctgttcttcatttataagaatttttttataagatggggagtagagtagggctctgtgctcagttaacattttcattcaaacttaatttccattctcggtcttgctattttaaaaaagatgccctctgtaccacatattatattttgtatgctaatatgggctcagagtgttttacattttgcatgtctaattttgcaaatcaatatgtttctgttatgggaatcaatggaagtttataagtagtaaaaaaataaaaataaccagggttgtaaaacacaaaaattattgatttattagcctttgcttttttttaatttattcacttattcatcactcatttgacaaatatttattgaacatgtctgccaggcattatggatctaggcaagatcctagaactcaaggagctcaatttagtgaaagagactaaagggagaaaatgaactagtgcatatccaacgctgaatttattaccagaaaagcaagcgtgggttttgccactaaaggtaatggcaataaattaccaattacaaatggtaatttattaatagtaaatggtaatggtaatttgttaccattatttttaatggcaaaacctgcaatcacttttgcaccaatctaaatacaactccttgaaaaggaatgaatcatctaggttgctgcagaaatcattttcattactggtccagtaaaaataatgagaatttcctaaaacaaaaacatcctttagtgccattgagatcactttagttaggcatgggaaaataagaaaactgtgtaactgatgatagatctctcacttaaaggcaagctgaggtagacagagaccttttgcaatttttatgaataatttgaagaggaaattgaaaaattatcttccctgttgaggtcatgatctttgcagaccccatattcctctttgcacagagaagacattaaatacatatttgctaaataaatgaatgtagaggcatggtttcttcagtagtgtatcataaaacagtaggacaaaaaatatatttaagtctttgtctgcttcttgtatcaatataatgctgacctcatagaatgaattgggaagcttttttcatttttatatggtgggatatcttgaatagaattggcattatttatttctcaaatgtttgacagaactcactaatgatgccacctaaacctggagtttttactgtgggaaggtttttaactaaaaattcatttactttaattgatataagggtatttgggttatctatcttttttgaatgagctttagtaatttttcttttttggctggtggcggtagaatttattcgaatgtgtcttaatacaggcactgggggcttgcccatggtgcgcttgatatataaagcctagacattctgccaatttttcttgagtaatgacaccaggaagttgacagtcaggtgaatgttatacacaagtttattgtctgtaacatttacatggccaacagtcacagccagacacagcaccttcgtcatctggaacttgattgtggacttcacctcatccacttcattttcattgtgtatcagcagggaagggaacgtgccagccttatgtaggcctgggcgaggacttacgggatctgcttgatcagagactctgatgccaaaagagcatcctacttcttggccagcttcttgaccagtttcttattctggttgaattttttcagcacctcgatgtccatgtgtgggatatccacagccttggcctcattacagtgctgctgtttctccaggacacacacagaacttagagcggggagtggacttaagcctgatggtgcccgagaagcatttgtcctggaggtcatagttcatcaaacttatctgcaactccagtctccaaaaacttggggcacttgcactcgtccccatgcagggccttcctgcaccacctcatacagggtgtcctgagagactttactgctcatggctcctcatgccatggtaattggaaaaggagcttcagtaacttttatcttacaaaaatttgttcattttatctgcactgataaatttcttatcgtgaatttgttcataacatccccttattattttattattttttattttgtgtatgatctgctgtgatgtcctgtttctcatagagatatctggaatttgtatcttctcttttttttttccttatctgtattgctaaaagttgatccatttttatcgacatcttcaaagaatcagaattctgattcactgatttttgtgggcatggttttgttttctgttttctcttttattgaattctgctctttattatttctattcccttgtctacttgagtttaatttgttctttttcctttttacatttttaaagtatacatttatcacttaaagcccttctcttctcttctcttcttttctttttcctttcttttctttattgagacagagtcttgctctatcaaccaggctggagtgcagtggcaagatcttggctcactgcaacctccgcctcctgggtttaaacgattctcatgcctcaacctcccaagtggttgggattacaggtgcatgccaccacactcagctaattttgtatttttaatagagatggggcttcaccatgttggccaggctggtctcgaactcctggcctcaagtgatccgcccaccccggcctcccaaagtgctgggattacagatgtgagccactgctcctggctttctaaaattcttttaacttgattgagacttgttttaaagcctagaatagatccattttggtaaatggtctatgtgctcttaaataaaggaattctatttatttagtggagtgctccataaatgtgagttcagtgaagctggttgatagtattttttagttcctctatgtacatattgatatgttatttacttgttctatccactaatgagaaaggggtttcaaagtcactaaataactgaagacgttagaatttctcttcaagttctgttagcttttgctttatgttttttgaagctctcattaggtcattaagtgcataaaagtttagttctgttctgtcctcttgatgaatttacccctttaccattgtaaaattactctattacatctgtctcaaattttgatacttttggccattatatttttcaaatattttttctgtctcttcctctccttcagagactgcaaggacatatatattagattttttgtgttgtcactgatattctgttcagtctactgttttttatttgtcttttcctggagttcattaatcttttcgcatgttgtgtctaatctgctgttaatcccattcagtgtatgtattatttctagaatttagatgtgtgtctttttttatatcctttaaaatctctctgtagcatacttagcttctcaaacatatagaatatagttacagtatagttacagtatttgttttaatatctgtgcctactaatctatgtcatttctgagttgacttcaattgcttaattatttttctcagtgtggatcatagtttcctgtttcttggcatgtctggtagatattactagatgccagaggttgtgaatttgattttattctgtgctggatattatcatattttaaaaaatattctttccttttgttatgaggtatagttactacttactggtgaacaatttgggttttttgaggctttttttttttttttttaaagagacagggtctcaccatgttgcccaggctggagtgcagtggctgttcgcaggctactgtgcccaaatttaatgctagctttttatgattttttactttttttccttaaggagagaccaaagcagccatgagtctagggctaattgttttctgttttattttccagacagtacctttctaattactctatttctcatgtgttacaagatatgtgtccactctgagtggaacgccaactctttctggccttgtgtgtgggttggcgattattccatctgctccttccaggcaggtgtgccccaggtgacaggtagctccttacagctgtgtgccaatcagcactcagctgaagactcaaggagacctgaagatcttcaccgcttctctatgaggatttttctctctctggttttctgccctgccaactctagcctttctaaaatcccgagtctttctcctcaacttagggattgtggtggagtctttcgaggtcctgcttttctgtgccatggcaaggaagctcactcagtgtgggtctggccctcagcaggatgctctgggctggtgatgtacatttgcaggttaccaatatgtacagcgaggggtgccttgggagtaaattaaagtccctcaggaaaggggtacagagtgagaagagaaaatcctaagatagagccctaaggaacatggaaatatatgtaggaagtgaagtgataagtctattataaggattttagagaaatgcccctaagccatttgtagtctagagtttctgatatgattccagagtgtagtcattatccagaaatttgataagtcaccagatgagattactctgggtctactgggtgacgtgcttcctttgggaacatcactaggagctcaagataacagcacatctagaatcataggaaaggcctatagggccaggaataccatatctccacagatgaaggcagtgttcaaccttagtttctacactaatagaccaccatggaaattaacaaaagctggtaataataacaataactatagtgaaaattaagtagaaaatgaagaaatcaaaaagaaaatgaaaaagggaaaagtctgcatctataaaacagacagattttggatttctagacctaaattaaataccgagactgtctcctactgtttggttcaccttggacagcttaatggccaaatgtctttgagtcccagtttgcatatttttcatatagggaataattgtattagaactttcagctttgtagattttaagaactgtacacataaaaagtgttctttttaagacttgaccatgattttgttttaaaaaaattgtcatggtaaataaatgaaaaataatatgaataattttaatttttggataatttttgtacatttatcttttttacctctagggtcatagtttcctaaaggtaaattccttttttttcctctttaaaatttttttataccaaaaaaaaaaaaaaatgagatgaggtctcagtatgttggccagggtagtcttgaattcttggcctcaagcaatcctcccacctcggcctcccaaagtgctaggactacaggcatgagccaccacacccagcctaggtgcaaattccttttaagagctcgttcaatgatataaaagcttagcttgaaaatttcaagtgtaatactttctctagttagagataatatatctctatttctgtatttgagttaaaacatgtttgttaaggatatgacattcaaatattttgaatgttaacatgttttaatatttatttcttgaccaagaaagcaattcttttcatatgcatgtaaactgctgtgaaagtacagattggctgatgctgatgctatgtaatagcattttaaattttgttttgtcttgtgaagtttagatgataaacttgtttatggattctccttaaaacttgcttcccttgattaaattcaataaaaacagaaaagtgtagttggaattgatttctggaattatacctgttaaggatttgaaaattaatgtctcttggttccctgaagtttgatattatttatgtggctcttattctatcatttgaacgtaagctttcacttttgatgaggtggaaattaaatgaggctaaggaaagtagtggcatgaccttatattgttatagtacattgttccaaggagatatttaaaaatgaatatcagagtctgaatttttcttcttgggtaaatgaaaatggaaataactagctaaactgcttcttttaatggaatttaataatataaaattaaactaatagaagttaaaataaatttatgagagttatgaaagtacttccaagagcatacaaaatagctagagttcttacttatttattgttatttattacagcattcagaataaagagaaacaaatgattgatattgtctttgttaggattcattcattgaatgcccactatgtacctggtatggtattttcaagctgctctattcagaattattattgaggtaactaattatattttcctggttagagtatcttctggactagattaatgtgaatattattacattactttaaaccttgctgaaagctttttgtttgtttgtttccatttataatgtctaaggaaactggataaaatgaaaaaagtttaatcacttttttctattgtaaaatgagtggcttcttgaaagtttttttggttaaaggagatgatgatatgaccacgtattagaatattatgcaaaaatttagaactatgctatgaaagaacatttaaggacactaacataccattgagtgcaaaaagcagaatataaaccttaattacagcatgatacaattttatcgttgttagataggcagatggaatataggaaagaacaagaatgaaatataaatggcagttaggtctcagtaggattatgagtggttttctttcttcattatgagggcttttttcaacacagttaaaagcaaacattttctgattatagaaacaatgaatatcattaaaataaataaaaactgatatccagtagaaaacattttcaaaatttaaagatattatttaaaattattttttaagccaccacaaagaaaataaattacaaaatttatgttttttttcattagggtgtatttatcatgatccttttaatgttcacaaatgaactactaaaggcaggtaaatttgatggatgaacatgtactaagtaggatttattttagatgatactttagggccccggttcaaaagtgtggcccagggatcagcagcagcaacatctcttgaaaacttgttacaagtacatacttggggcccagcaatgtacgtttttacaagtgattttgatccatgcttaaatttgggaaatattgctttacgattttgagttatgagactgagctagaacaatttctcaaaaattttattctagaaaatttccatctaacatttgccttctctctttctgtcttatttctccctatttctctctgcctctctgttacacataacttagtttttgttgaatgtttatatatttaccttgtttctccaaaatatatgaggcatgtaaatacaggtgttaaaaatgcaacaatatactaacaatagcaaagactcatttactgctatctatcttctatgtattgctttaagtactttacatatagtatgtcatttaacttaattattaataataaccctatgaaacagttattaataaatccccattttacagacaaggaacctgaagcacatggctaaataacttgctaagagcatacatccaataaatggcagaatccaagcaaccttattttgcagcctgagcccgcaaacagttcactgtggtgtttcttgaaagtaaaattagtggagtgacaacagcgaattggccccagtcttcactccctccaacagaaagattaactagcaactatccacagacaaaaatatgttattgaaactccacagtgtaggaataagcctgagtcaatgcttttcttcatttccatggaactaaataaaattccccattgaaagctgaaagaaacagtcttgctttgaccatgtcatccttccctcttcctcaagttgccacagcaccacacaggattccccagggctcatggtttctacagtcaaaaaagagaggtgaggaggtagacatctaacttctctgacacttcccaggaagcctacttcactcccacctcacaggaaacaggaaacaggaggatatggcacagccagatcacctggggtcacaacgaaacaaagcaaggagggtaaaacccacggagaccagtgggtagatcttgatgaaagctcagtgtacctgccagcagtaccgtgatcagagatatcaggtaatagcataggtcacctgcaaagtcaagctggtcactcccagaagaggtgggaaggactactaggcttgaatccctcgatagccagcctccatgtctagcttttgaccctacccctgggagctcctcagggactgagaaaaccctttccctacccactggcggtgaatttccacaacaagtagacactagatctgccataaactgaagcttaatgtttcacacagccccaaagcctatcccctagaccctacatagcgagaaagacaatcactgcagcaaattttgacaataagcaggtattagttttgccacaatcaggaatataatatactgagtatagcgtttggtccattcatcacaatccaattaactttagggtcccttctgcaactttgtccaactgatgagtccagatagcagtatattccagctggagaatatactctgtagcccagccagatcagaagtgactttagtgcccacacagaagctcagcctcatagcagggcttagctggtggtcttgctggatagcagagcatagccagctgttccacccaaattcagagaaaaggcagtgacccagacatctagagaacctgaatgcaagctctgcctgcccagattcattaccagctggcccattcagaattatagcatagactaactagtgaaggtctatctctgccaaagaactcttataaatgccagaaaaggtggctttctctgaaaatgcataaacagcaatgcaggaacacaaagattacacagatttgagaaatcatgacacctccaaaagaaactaacaaaactccaacaatggacactaaagaaagggaaatttatgaaatgacaaaaaaatttagaataatcctcttaacaaagttaagtgaacttcaaaaacatacagataaaaattaaataaaatgtgtaaaacaatacatgaacaatatgagaagtttgacaaagaaatagaaacaattaaaaaatacccaaatagaaatcctagagatgaagaatacaatgcttgaactgaaaaatgcaataaagacttcaacagtctgcttgatcaaactgaagaaagaatgaatgaactcgaagacagtacttatgaaatttcccaatcaaaggagcaaaaggaaaaaaagaaaaagaataaagtatgaccgtgggaattatgggacaccactgaggcctaacctgtgcataatacacatttcacaaggagaagacacagtaaaagggccagaaaacatattgaaagaaatattggatcaaaaagtcattaatggccaggcacaatggctcatgtctgtaatcccagcactttgggagaccaaggcagatgaatcacctgaggttaggagtttgagaccagcctggccaacatggtgaaaccctgtccctactacaaatacaaaaaattagccaggtgtggtggcgggcacctgtaattccagctactcgggaggctgaggcagaagaatcgcttgaacctgggaggcggaggttgcagtgagccaagataatgccattgcactccagcctgggcaacaagagcaaaattccgtctcaaaaaaaaaaaaagaaaaaatgtcattaattgaggaaagaaaccaacagctaggtacagaaaatgtagaggtcatcaactaagttcaacccaaaaaggagttcaccaagacatataataatcaaactatcaaaaatcaaaaacaaaaaatttctgagagcagcaagagacaagcaatatattacctacaaagaagtctcaatacaatcatcagtagacttctcagcagaaactctctaggccagtgggatagtattttcaaagtgctgaatgaaaaaaaaacaaaaaacaaccctgccaaccaagaatgctctaaccaccaaagctttcagaaatgagagaaataaaagctttcccaggcaaataaaagctaagaaaattcatcatgattaggcctctcttacaggaattactaaaagaaattctttaagctaaaaaaaaaaatgcttctaactagtaacataacatttagaaaagcacaaaacctaatggtatacataataaatagcaatattcagaataccctaggactgtaatcatggtatgtaacataattttatccctagtgtaatggttaaaggatggaattattaataacaactatagctaaaataaattgtcaggagatatatattataaaatgttaatttagacatcaaaagcataaaatttggaagaggggagtaaaagtgcagaattgttacatgtaatcaaagttaagctgttatcagtttgaagtagactgttataagtgtaagatattctaggaaaatctcatggtaaccaaaaagtgaaaaaacattcaaaacataccactaaggaaaccatacaccatagcaaactataaaggaaaacaacaagacaggaagaaagaaataaagtaactacaaaacaaccagaaaacaacaaaatggcaatagtaaatctttatgcaacagtaaccttgaatgaaaagagattaaattctctaatcaaaagacatagagtgatgaatgaactaaaaaaatgagacccaagtacatactgcctacacacttcacttttcaaagaacacagagattgaacattaaaggatggaaaaagatattccacacaaaaggaaaccaaatgagaacaggggtagtgatagctacattagagaaaatagactttaagtcaaaaagtattttaaaaagacaaagaagggcattatataatgataaaggggtcaatttatcaataggatataacaattatatatgcacctaacagtgtagcacctgaatctataaaggaaatattaaagtatctgaagggaaaggtatatttcaatacaatgtaagtagaggatttaataccccttcaatattggatagacataaaatcaataagaaaacagtggacttgagcaacatttcagactaactggacctggcagacatgtacaaaacataccaaaccaacaacaaccaaatacacattcttgtcaagagcacacagaacattttccagaataaaccatatattaggtcacaaggcaagtctaagcaaatttaagaagattgaaatcatatctagtatttttttctgatcacaatgggttaagactaaaaatctgtaacagtaagactttcagaaaactcaatgaaattaaacatgctcctgaatagccagttgatcaatgaataaaagggaaattaaaaaatgtcttgagacaaatgaaaatggaaacacaacataccaaaatttaggaatgcagcaagagaagttctgaggggtgagtctgtagcaataagtgcctatatcaaaaagaaaaaatatttcaaataaataatgttacaccttaagaaaacataaaaagaacaaactaagcccaatgttagcaaaagaaaataaataagaattatcacagaaataaatgaaatagaaaccagaaaaatgatttaaaaaatcaataaaactataaaactaagagtggttatttgaaaaattaaacaaatttgacaaacctttagctggactaagaagaaaagactcaaataaaatcaaaaataaaagtggagacattacaactgataactacagaaacacaatcataagaaactattatgaactattatatgccaacaaattggatgacctagaataaataaatttctagacacatacaacctatcaagactgaatgacaaagaaatacaaaatctgagcagatgaataacaagtgaggagattgaaccagtaataaaaagtctctcatcaagaaaagcccaaggcctgttggcttcgctgctgaatgctgccaaacatttaaagaactattaccaattccccactgacttttctaaaaaaatcacagaggaaagaatacttccaaagtctttttacaaagtcagcattacccctatactaaagccagacaaggacatcacaagtaaagaaaactacaggccaatatccttgataaatatagatgcaaatatcctcaacaaaatactcacaaataaaattcaacaacacatgaaaaggatcatttaccatgatcaaatgggatctatccctgggatgcaaggatatatccacattgacaaattattaaatgtgatacaccacattgacagaaaaaataagtcatatgatcatcacattagatgcagaaagaaacacttcacaaaatttaacatcctttcatggtaaaaaaaaaaacactcaaattgtatataggagaaatgtacttcataataaaggccatatataatctcacagataacattatactcaatggtgaaaaattagagccctttcatctagatccagtataagacaaggatgcccattctcatcacttctattcaacatagtattggacgtccttgaaagaagagtaagttaagagaaagaaataaaaggcatccaaatagaaaaggaagaagtgaaactgttgtttgctgatgacatgatcttgtaggacagaagaccccagattggggcttagtccaagagggttttggcttcacccaggaaataattcaacagcaagccagtggtggtagacagcaatcatattaaatggtacttctccttgaagagcacggctgacttattggccacgtgcccagggttggcatcacaagggatcttggcaactttatttatactcagataaatctgctttcaattataggaaaattaaggggtggatcaatgcaaattcagggtggattatttagaactctctaggaaaaaggccataacttccaggttgttggcaaagtgggtggtaacttctgggtcattgtcatggcatgtgtaaactgtcatggtgctggtggggagtgtcttatgcctatgagcaaggagggcagctagggatcactttcatcatcatctgctggttcctgccagtttcttcactttatcctgtctggaccagatcttgttttgtgaccaggaagtaagtcttcctggtctcttacctcaatcttacatataagaaactctaaagaatccaccaaaaaaaaaaactgttagagtttatcaacaaatttagtgaagttacaggatatgaaatcaacatggaaaaattaggatttcttttcactaacaacaaactttggaaaagaaatcgagagaataatcccatttataatagctataaaaaataaaataggaataaatttaatcaaggaggtgaaagacttttacaccaaaaagtataaaacattaatgaaaaaaattgaagacacaaatatatggaaataattctggctggaataattaatattgcaagccatgtatctgatagagaattagtattcaaaatacctaaggaactcaactctatagaaagaaaacaatctgattaagaaatatgcaaaggacctgaatagatattgtaagaattacactatgcaaagaaatttacagatttattgcaattcttatcaaaatcccaatgtcatttttcatagatatagagaacacagtcctaaaattcatatggaaccacaaaaaactcttaatggccaaggcaatcattagcaaaaggagcaaagccagaggcatcacactacctgatttcaatctatactgtactacaaaacagtagtaattaaagcaacatagtactggcaaaaaagtagacacattgaccaatggaacagaagagagagcacagaaattaaaccacacatctgtggtcaattgatttttgacaaaggtgctaagaatatacaatggaaaaagagcactgtcttcaataaatggtattgggaaaactggatattcatatgcaaaagaaatacactgtatacacactgtatacaaaaatcaactcaaaatgggttaaagaaacataaaacctgaaagcgtgaaactactaaaacaggggaagagctacatgacattggcctggatgataacatttttacatttcacctcgaaagcacaggcaacaaaggcaaaaataaacacatgggattacattcaaataaaaagcttatttaaaacaaaggaattagcagagtgaagacacaacctagggattaggagaaaatacttgcaaaccatatacctgatagaaaactaatatccaaactatacaagaaactcaactctatgggaagaaaaactagtaatctgattaagaaataagtaaagggctttcgcagatatttctttaaagacatacaaatgggtaacagatacataaaaaatgttcagtatcactaaccattagggagatgccaattaaaaccacaacaagatattactttacacctgttagagtggctatcatcaaaaggacaaaagaccagcattggcaaggtctggagaaaagggaacttatgcactgttggaagaaatgtaaattagtgtagccattatagaaaactgtatggagattcctcaaaaaactaaaaatagatttgccatatgatctagcagtcctacctttgggtatttacccaaagattttaaatcggtatgttgaaaagatgtctgcacacccatgtttattgcaccactcttcataatagccaagctgtgggattaacctaagtgcccatcaacagatgaatggagttttgaaaatatggaatgtatgtacaacgaaatagtattcagcctgaaaaaagaaagtttgtaatttgtaccaacatggatagaattggagaacatatgctaagtgataagccaaacacagaaaggcagattaccacatgttctcacttatatgtggaatataaaacaattgcagttatagaagtagagagtagaatggtggttaccagaggctggtgggtagaggggatgaggagatgataatcaaagggtacaaagcctaagattggaggaataagtctgcttcttttttgagatctgttgcatagcatagtgaatatagataataattgagtactgtacattgtatcattaagagagtatagctccaatgttctcatcatgaaaatgtcaaatatttaaggtgatggacagttttataacttatgattctaccgatattgtaaaaaatcactttgtaccttataaaactataatttgtcaaaatataaacttttaaaaaaattagtgaggaataagggatgaatgaaaaataaaatggcaagacgaatacacaatctattctgcaagttttatatagttgctaaatgtggcccatgaatttgcctgtagcaccagcagaaagtaaaaaaggataaaatacaaaatttataatcaccaaaatatgtaatcaagccagttttcagaaaggtcacaaatgagttttgagagaaacattttttgtgtctctgcattctcagaaggatgctgtattagtctgttctcatgctgctaataaagacatacccgagactgggtaatttataaaggaaagagaggttttatggactcacagttccacatgactgaggacaatcatggtggaaagtgaaggaggagcaaaggcacatcttacatgggggcaggcaagagagtgtgtgcagggggactgcccttcataaaaccatcagatcttgtgagacttactcactatcatgagaaccgcatgggaaaaaccgacccccatgattcaattacctcctgcctcgtcccttccatgacacatggggattatgtgaactacaattcaagatgagatttgggtggggacacagtcaaaccatattatatgccattgtaattttcattttgttcattcactatttatacaataattatttcttgaacaccttctatttgttagggttgtgctgtttgcttgaggatagaaagaataaggatagaaagaataaaacagggccgggcgcggttgctcatgcctgtaatcccggcactttgggagactgaggtgggtggatcacctgaagtcaggagttagagactagcctgaccaacatggagaaaccccatctctactaaaaatataaaattagctggttgtagtggtgcaatgcctgtaatctcagctactcaggaggctgaggcaggctgaggcttgagcctgggaggtagaggttgcggtgagcggtgatcacgccattgcactccagcctgggcaacaagattgaaactctgtctcaaaaggaaaaaaaaaaaaaaagaataaaacagaatccatgtcttacagataagcagggtctagggtaaaagaataatggctgtatctttctttggctttcatcacttcatgtttgagggaggagtaagaaaatataatgacaggcaggagtggacttggattgaggttgcaataggagatgaggcctgaaggaggatttgaaacaaaaatgaagcactcgtgtgggctgacagtgcctggtcacagaaacaccattcattcctttgacttgactacatctgtttctaactacaatctgtcatttaaggatacctctcgatgacctggactctgagtttgggagtttccttggattcttaggaaatcatgtggctttggtgataaagtgaagccgggtggtaagaggatgcaaagtcagctggtttcagaaaggctctgaactgtgtgtgtgtgtgtgtgtgtgtgtgtgtgtgtgtgtgtgtgtacgtgtgtatacatatatttatcactaacagagtgatgtatgcctggctgcctgaccaaagatgaccctttcacctctgtaaataacccttaaaagctgtacatagacttttaaaattgcttttcctcctttctccatccagaatttatctaatttatcttggtctttttgggctaccataacaaaatatcataaactcggtagcttatatacaacagaaacttatttctcacagttttggaggctgggaaatccaagatcaagatgctggtagatttggcatctggtgagggcccatttcctttttcatctatggtgccatcttgctgtattcccacatgatagaaggggcaagggagctctttaaggcctttttttttcttttagagacaaagtctcactatgatgcccacactggagtgtagtggctattcacaggcacagtcatagtgcactgcagcctcaaaaccctggaatcaagcagtcttccaaccccagcctccttactagctgggactataggtgcatgtcaccatgcccatctctgagactcattcatgagggcaaaactctgtcttcgtgacctaatcagctcccaaaagtccccatctactaatatcatcaccttggaggttaaggtttcaacatgtgaattttgggtgtacacaaatattcagactgtagcagtcaaaatgatttgtcacagtggtcacagctccttcccagttatcatggccctgtcttctgccacttttagccatgagcccctagagagagagatggctcagattatcatactggggcctaatgatatgtatgtgagtgactttgaccacctggacattcagctggtatttctaagtgaaaatcatatcaagagttatgtttatgttcagattttaaaatgaacaatgtcagttaaataacacgttgtaaaccaaaaataaaattcgaaacaacccatccatctaaatggaatcctcttctcagctaggcatattccgaaggtaacctgaaaaactagttcaggccatgatgagaagtgggagctggacttgcctaatttgtgccctcctcccttttggaattgctgatagaacagactctaagtctgataagaaacatttacaatctattctctctgaagcccgctacctagaagcgtcatctgcgtgataaatccttggtctctacaaccccttatagtaactcagacattccttgcttttgataataactctttcaaccaattgccaatcagaaaatctttgactccacctatgacctggaagcccccacttccagctgtcctgcctttcaggactgaacaaatgtacattttacatgtattgactgatgttttttgtttgtttgtttgtttgagatggagtctcgctctgtcacccaggctggagtgcagtggtgcgatcttggctcactgcaagctccgcctcccaggttcaagccattctcctgcctcagcctccagagtagctgggattacaggcgcctgccaccacgcccagctaattttttgtatttttagtagagacagggtttcaccgtgttagccaggacggtcttgatctcctgacctcatgatctgcccgccttggcctcccaaagtgctaggattacaggcatgagccaccgcgcccggcctattgattgatgttttatgtctccctaaaatgtataaaaccaagttatggcccaaccaccttgggcacatggtctcaggatctcctgagggttctgtcatgggccattggtcactcacatttgacttagaataaatatcttcaaatgttttacagagtctgactgtttttattgacagcatgatgctagcatatgtgtttcatttttaatttgaaacaatagatatctagtgatcttttctggactgcttttgagtaggaagaagaagaagagcaaactcattcagaagcctggatactacacttgaattatttaacagggtctatcacttagagtggggtttgaaggctgtgttgagaaataagcataaagatctttggcatgttcactagagaatagatttcccttctaggcagtgataatcgtatccccacccatttttcatggaatgttgagaagttgtcacttcttgagtttcccaagagaaagcagcaccacttacttttctttgtctttgtttcctctttcagtcccagcagaagtgcatcgtgatctttgccctggtgtgctgctttgccattctggttgcactgatcttttcagccgtggacatcatgggagaggatgaggatggactctcagaaaaaaattgccaaaataaatgtcggtaagaggtaacaaacaaaaattctcttttagggggcgggcaagaaatccaaagagggccttgaacaatggagaagagaatacataaacacacgtagtcatccaggctccccttagcttaagctgaggtgtgagtctgtccactagtactcttacttttagggcaagtaatgagtaatgattgaattcactttacaatctggtcatattctctacaggctggtgggaacaaaaaaatttttctaacagtcagcatttctggagaccactgtatatgaggtttgttttgggtgttcatgatgagcctgtaaaaaggagtgccccaatggacaaagaacgctgtgctagttgttccatcaaatgtaagttaaaaaatacacgtctcagggaaaattccaacttaacgttagggattgaagaagtaagtgtgtcgatgagaagacacagggctcctcgacctgtcccagtttagcacacagtttgtttttaatctagaaactacaatagctttacaggtttatgtatgcattatgtctcttcagttacattaagtagcatttcctgggggccttgctgactggcagagacatcacagtgtagtctcaaccccagaaatctcctcatcaaactcttctctgagctgctaccattttttcaggttcggggagggtgaagaaaagtaccaaaagcaggcagatagataagaggtctatttttatatatgtattgctgcaaagctgaagtgaggccactaaattacaacagtaattatgaattagagcttataataaatttaaattgttatatttcccagtggaaagcgttagcctaagaccaccccccaactttcctagcttaaaataaacaacaacctggtaatgtgtatgtgagttttatcctggatattttgctttgaggttgaatgttctggcgcaggaaatgttctgaaaagacaattggcatttatttttaacccatggtaccttatagtctagttaccaggcagcaggtattacatacagagcagagcataaaagaaagaaatcaaaacacattttagattttcttccttcatgttagaaaggtattccataatattatgtagccataaaaaggaacaagatcacgtcctttgcagggacatgaatggaattgaaagccattatccttagcaagctaatgcaggagcagaaaaccaaatactgcatgttctgacttataagtgggagctaaatgatgagaacacatggacacatggtggggaacaacacaccctagggcctgttggagggtcaggggtgggaggacggagagcatcaggaagaatagctgatggatgctgggcttaatatttacctgggtgatgggatgatctgtgcagcaaaccaccatcacccacatttccctatgtaacaaaccagcacatcctgcacttgtacccctgaacttaaaagctggaaataaaaaaaggtatttcataaatatatttacttctcagactggatttggatgaaaaattgttttgtgattactgtaatgaaagcaatggaagaacagtagattactgtcatcttttgctaatgctgttacttgtcaaatatacatagacaaggggcccataactcatatttaccaagtgagaacacactgcttctctctctcctcaccttaaagtgaagagtgctgtgtattttaaatgcaaactcgaacacctagaaggcaatttaatagaggtcaaaccgtagcagtttccttaagacaaaatacctgctcatttcaatgcacgttatcaggtattggtaattttcaacaacaaaaggtcatttttttttcacttggaggaagctaaaatttgctttaatttttatttttaattcatgcaactggaattagggtctggctatttcttctatcagtaactacattctaatgacttaattctacttctcccaccatctagaaaatattattctagctactaggcattctcctttcctttgggtggttggactcactaccctggttactagataacatatatcatatatatgtgatattacatatgatatatggttgtatatatggggggggggagatcttttctgaaacatacatcacctctaggtctttcctctgcagcttcttgccctgtgccctgtgtttctgttctgcattctcagacattacaacatacacttcttgtgtgtctgtcctggaactggtatcttgcttcccctaacttcacccccaggaagtttctgcttttgctcttctctccaatgcacaggatgaggaggtagggttgctgcatttccttataccctaatccagtttccaacctgttgtttcaccaccttttctggattattctcatttgaatttgatttgatcttccacaagctcttctcctgatagggtctgaggacacctgtgggctttaggtcagtgttgatatcaaggttgacagaatccttctgaaagtcatattctgccaacagagggtactccaggtggatgcaacgtttctggagttcctcaatcatttcctggggagtgagccttttgtgcctggctaacagacctccacccatccatctcatcccttgccaatgtttttagcaacttaagaatttacttcccaatactctagccttgccattttttaagcacttcaaatcaatacatttaatatccacttcaccctcacacctacctgccagcaagcaactccatttccaagctagcctaacgcagttaacaaccatggactttgaaattaggaagatctgaatttaaatctacattctactacttactaactgtaagcttggggaagatatgaattgaattatttcattcatcccctatcggcagagcaccaagagactgcacaaggagttacagtagagtcatgagacgattgtggcaatttaccgtggtcacaactacagtgggtgatatggtttggctgtgccccattcaaatcttaacttgtattgtatctcccggaattcccacgtgttgtgggaaggacccaggaggaggtaattgaatcatgggggccatctttccagtgctattctcgtgaaagggaataagtctcacgagatctgatgggtttatcaggagtttctgtttttgcttctctctcattttctcttgccactgccatgtaagaagagcgtttcatctcccgccatgattctgaggcctcctcagccctgtggaactgtaagtccaattatacccttttttgttcccagtttcaggtatgtctttgtcagcagtgtcaaaacggactaataaaatggggatgtcagagagggtctgggagagtggcctgacatagtgaaatgaataaattcggtgtgggacacctcttcacccttaatgggttatgaaagctcttttaatttcattttccttaaaaatcatagattaaaaaaatctgtgtcacaaagtttatgaggattcagtaaattgtataaacccatgccaaagcatcaggaaactcataataaataatatgcaaatgttaattatctccttgttcctccaaagagtctagaaattcctcttctctattcacaacctacttccttttcctcccacgtcttcacttatctcgaatctatcatgattttagtctttggttctatggaaatatacaaagaccaatcacatgagagcagaggctatttagttagagcttgctgccacaagggagtcacccaccatcaattgtgttttgcagagactcaaaggcaggcagagaaatgggaaagcttcacagtggaagaaagaaggctctaggtgtgctctgattagaggctattggcttcggtaggctgtaggtgcgataacgagaagtgacatcctatgtaattggttagagggtcatatttgactttttctggttgatcctgaattggaaatagcaacaaaaattaaggaagctgttggtcattaatcaagtcccggccatttggggccgattgttacagaaattattgtttagcttcctggattgttactagagatagcaatctgatttcctacaagtctaacttacagcagactgtcttcctgggctggttattgcagataaggggttagtttcctgggcaggaggctacagattgtacagccttcatatatgatttggccattgtccatttgtttattcagtctcttacctccctgaacctcctcctctatcaaccccttctgtcttaattttcctcccatccatttgccagatcatgactagcataccaccatgcttcctgcagcatcttgaagtctcacttgaattttttttttttgaatttttttttttgcctcgatctggcagccaattcttaaactggttgactcctggttttacccatccttgtcctcagggcagcctcagccattggtccaggccctcataagtctgcaggagagtgggtcccactgttgttcagttctagattcctccaggcagtcatgtccctggtaaaagaggtgagggctttttggagaagcaccattgaatatactggtgctgacacagaccagtaggaaaatccactggtctgcagaagctcgagcatgccagtctcaacttaaatgtttctctagaaaattccagtccttcctctcatgacttcatccctttcctggagctaacctccctggacttcttcccagactttacctgaaagtggcgctaactctaccccatgatgctcagtttccaattactttgttctgaagtccaatgtgttatctttctgcttttctccgtgtgttgtcactatcataaagtgctgcttacgcagttcaacctttgctgagatcttattactttatcgttaaactccctctgtgtgtgtagcgctcctcacttctgaaagttgaaagaatatcaacatttacagtctgtcagcatctcatcacagttttgacagtctctccccaagacctcttcatctggtgtactctttcttaaatatagtactttaattcatcttatttctgctaactagcctctctatcctctaataagattcccattctgattcattctgcccactcaatgtttttccaactttcatatgcctctctaaaaaagtatgtctcctataaaaaaatccttatgattttttgtcttgttttatttcttcccccctttgtattattttgctgctagattactgtactgatagtggataattttatcataatttccctcacaaatctacaaaatatcaaaggctctaaacttattttccaaatgtcttttaatgagcctcagttgtaatgccccaaaaataagatctttgccagtaaatgaccttttttttttgtctctttgtattggatttctgggcacttccaccatttcccaatatgttttaaatgatttatttggtccttataactttaaatctccacgtcactttggttacctgagggggtgaaagacattttctactttctgctagtaacctacatgtcagtaggcctgggacatcactgacaggtaaggaaagttcaaactgctagtttaggttgcatgcatcctgtgacttggctattttgcaattcgctagtgcccctgatcatcctcgtacctcattcttgtgagaggtagccacacacggtgaagtttcccacacatcatgtcctcagggaccagcagagacattggagctgagctccaggtgctgctcaattgcagaacacctgctctcacatgaacacccaccctttcagaggagaggtcttcattttgtatatatagctacttccatcttcccttccgcccacacagagctatcctacgtcagtcattttcagttgctactccaccacttattagagacactattagacactcactagaagagggacttttgttgctattcctccctgataaatacacacagaaccagtcagcatccttctcctccctgacttcaggcccaatcctcatgacaatatggaaattaatttctgcaaagtatcgttaagcaagctgagtaaacatactgtcttgggtgggctaacattgccatataatcatattgataagcatgtgtcacctattttatctaggtagttatggcagcctctgttcaagacctcctcacacttgcctctcatcttcctgaatcagcccccgtgcctgggtggctaccggtctaggctggctcactcttgcccacatatcttcacattcattttagtttgctcacttagtctgaagtatgaaggaaacggaacaactcagtctatctatctgtatctctatgtctcagtctctatctctaacctatctaatccccattattcctgaatccagaaattttctttcatcctaaattgaatagatttgggtctgtacaaaaggggtcccatgtaatattataggctgggtaaccaatgtataagtttccacagcagttctccaataaggagtgtcctagatcaccaaagtctggtcacagaaaatatagcaagggccaaattcactttgtaatataccaccccttcacacatagactttttatacatcctttctaaattttcaagtttctctattaaaaagctgactactttatatttttcacatactttatttgctgaatctcttcctctgacctatcatttcttaaaaaatatctacagacatctagatttatatcaataactcagctgccacttcagcatagtacacacataatttggttcatcaatatatgacattcctagaagacactattgagagaccactttatgtgttgacaattacctcctagtattttgtcactttcctgtttagtatcatgaccttagagtggtcttaacagactcagcttgctccagtggactttaatcattgttttcccttttaatgcccaaattgtcactacttggccagtgagagccaccttttgtactttttgacactattgcaggtatctctaagagcagccttgctttttggcaacagcaagcttttctagtgctattttaaattagctagctttgagacatggtattgtctactttcaaatgagccctggttccttttcatgaagacttctattaaagaccagaatctaagttctatgggtgtccttatattgtcgtccaagggtattgttgatagacacaatgataccgcaggaaacgttcttaagctgcagtaatgaacaattgtatggtactaaagaattgttcagcactgactgaatagtacttctccctccctccttccctcttcctctcccttcatttcttcatattccagacataagcatgtggactatagggccagattacctgggtttgaatctggctatacttaggagctttacaatcttggggaagtttcttgattttactgtgccttgttttcttttcatctgtatattgcagacaagtattgggtcttgtgtgaaaggcttctgtaaagactaaatatgttaatgtgagtacctttgatacaatagcatctgtcatataataaattttcaataaatatccactattattcttcttattaaggggcagaagtttattgcaggtgtttgcagttttgtttttttttttactttcatcttactttgctccaaaatggggaagagcttattatcatttttcacccttttcttaaactataaattttccccttatctacattaactttgatctattttgctttgtattgacaaacccaactatgtttttaaattacagtgttgctcccaaatttggaagatcccatttggttttggctccttatttgatatctgagcactcttctgactgcctaaaaaaagaaaaagaaggtagtctaacttattcttcctaacccagaggaactctgaagaatgtaaaagcctagagcccttgatactacaaatggatttccagggcactaaatgaaaaatagcgatgaaaagtagaataaagacaaaaactgtctctagagccttttattttatgtcctctcctagtttccccatttgagctgatagtgagcctatcgcctatataatattctgaagtattttcccttttatcagtgccagtatctatttcttctggaattttctaagatctaagaggagagagaagcatttatgtttaattaatgatgttaaacataagtgagtcatttgatccatttcttactggctccctctcttttccagttgtaaatcccttccacttccctccccttcccttccctgggcctctgtttagagattgctttggttgagaagatggcgtccacctgatgtaactccttcagctttctttccaactcagaatcccccaagtgacttcattcgtccttccctccttcgatttttatctcagaggaagagatgttcctttccttttctaaaactagcccctctgtcaacacactgaatccagtggaaataaatgaaggccaaccccatgagaaaagcaaaggctatttattctgagcttgtatagcaagagactcagccaccatcacttgcattttggcagagactcaagggctggcagaggagtgggaaaactttgtaatgaagagaaatgaacactacatgtcactttcccttttgagcctctatgccttcaaaggtcatctgcattctccgagtcctgagctgaagaacctcatccctctttgattcttcacttttttgccccctttctccaaataaaagtccattcctgtaatgggaactttggtcttttattggcattatcagcatttctgtttgtttgtttgtttgtttccctgaatagatcaaaagttccctgagaacaaggaacacatctatctgtctctctctgtgccccatgctgtctctcacacctggctgagcggatacctttttttaagtgggtgatagtttccatgaaaatacaagtataaattaaagaatagtgttcattgagataatatgtattattacattactttattattcctccatagtagaatatgccttagatcaaaccgagaattatgagagaagatacaatagtttatacattatatacgtaaagactatcatgtagaaatgagttagaaaaagaaacttgcaagggagttgttaaaataaatagaatagtctgatgctatactttttttctaactagcattgaataaactgttaataataactggaaatgggagatagcttgattttaagtgaaggaaaagagaagtctccaaacacatttaaatacagatatttttatgcttctgaactctactctcctataagatggcatgtattagtattttcatttcaccattgaatccagtaagattcagatttcctgaactatgggatttgattagcccaatatccagaaagtattgtttacattccacagctaaagtttaaaaaattatgttaaaaataatgtttcatctttagcatttaatatttaaaggaggaaatccgaaagtgtgtgacactccctgatggtctataattaccactctgagaagcagcagaagctaattatttcaaagttttgattttaatgaaacttaatatatgattaatgatgttgacatttcctgccaccaggtttgttctccaaagagataatttgaatgtgatatgtatttttcaaaaagttcattgaacccttatgggcacaatcatatctgataatcatgagtagtgttgaaaacagaaagtatagctgtgttttccacagacaacctgtttcagctgccttgtcaggaagaggccctatgtgtaatcattctcatagtaacagctaagagcccaacctgaacctgaggcaataggaacattgatggagggagtggagtgggaagaaaaataaagagaaaactggagttgatgtgtctgatgggtattcttatattttggttatagacctgtaattagaaattttcctaatcagaacttccagttaaagtaattgccatggtcacaaagactatactgacaaaaattttcaacagaaaaatctgttaaagaactcataggacctcagcttccaaaaccatagaatttagacatttagaacaggttgcaaggttggaatgcagcatttcagaatgggtttatgcttcagaggggaaactttgaactgtgagtctaaaaggcatggtagcaagcaataaaagattctgcaaaccaacgtgaacgacaaatccaaagcagttttcagatattactcaccctggatgcagcgatatgtttgcaacatgaaacttaggtaagttcagatgacctaggataggtttcctgttgtcccttcaagctgaggaagtcatctaaactcagcctccgtactcccatttataaattgatgagaagttttcttccatgctgctgtgagacagaaataagataattcatgtgtagaagactgcaaagtgctttacaaagtgaggtattatatgatttgcttgcttatttatttatttgagacagtgttttgctctcgttgccctggctggagtgcaatggcgtggtcttggctcactgcaacctctgcctcccaggttcaagcgattcttcggcctcagcctactgagtatctgggattacaggcacccaccaccatacccagctaatttttgtgtttttagtagagacggggtttcaccacgttggccaggctggtctcaaactcctgacctcagatgatccatccgccttgacctcccaaagtgctgggattacaggtgtgagccatcacacctggccgatttgcctattttttgagctacactctcaaaggccaatagcatccaatgtgagaaatgtcatcgttaaaatacagtctactgcctcatgaggtctatacttttatgaaaatagaagagaaaatagaaagtattatgcagatgctttcttatatttaccttgcaattctcagagccatcacaagccattgagaagcttcagtggcctggccctcgctgggcagcagaggtcaaggtgaagtgtgtgagacatgcccaagagctcactcaggctctacatccaggagacctgatttgcatctcagctcgtctacctactgtgcaaacttggtcatttaagcagccttgatttgagcgtagaatgatggtgatcatactagtacatattctacagagttttataaaaaaataaatggatgatagtgtgtaacttgtttgaccaaaacagagaaacgtataggtcagagatccctgccttccaggttaatctacaaaactcatcatcttagatttacctcatttaactttgcttgttttattacatccatatttccaagttatttcattacatccttgccttttaaaacaagtaactatgtatgcaatagaaaaacgaatatatacagatgataataatgtcaacaattcagttttacaatgaaatgcaggccctgtgtccccttgcccagatgcaaacactgctaacactttcttatatatcttcccagaaatatgattttatatgtggatatttgtattgtgcatgtttatgtatcagtcccttttttctcacagatgggagcatatagacatgatgtaccatgaacgatttttttccacgcctttacgtattaagacagatagatccatggctgcatggcactcattgtatgaatatgatataaataattcaactagtcctttgttgatttgaaagacatttaggttccttgggggttttgttgttagcgtaatgaccagtgccacaatggagatctttatcgatcctggaacacgtttagcctaggtagtagaatatctttaaatacctagaaatggaattgctaggtgaaagggtagatgtggtttaattgtggatagacagatagtacaagttggattccaaagagtctgtatcattaatgttatgattatttgttttcccccacgattgtcaacatcacaaattatcaaattctttatctttgccagtctgataaaagaaaaaaatgtatttttaaaaattctgaggagtgttgaaaatcttttcacatgtttttgagacatgtttacttcttcacctgtggcgtgcctattcgtgtcctctgcatacataggagaaatatggtttgatagaggattcagtaaaacatcagcatatgagaccaatacagtaatccaaataattattgtattagtaacaaaataaataacatcactcacagagcacatctaatttatcagagagatataattagattttggagcctttctttttcatcatattagaaatatcaatttgtgggaaattttcataggcagttattaatgttttaccttcatagaacattgaaaattgattatttgtgcatatataaggtgagctttcactgtgagctctttgcttcaataattgtaacatttactctataagatgaatcagggctgtcccttattataaatgaagtactttattctgagcactcttttagaaatattgcagtctgagatattcaatcatttggctagatgtagcatctatgcagatgctttcttatttttaccacgcaattctcagtgatgctatttactagtaactgaagttagagtcaactatcgtattttgacttgattttcacattatttagtctccaggcagatcttggtagtccgttcttactacaaaaggatctagaactacatctccaaatggtgtggactgtggttcatgacagatgaccagtttttggatattatttggtgttatgacagctatcacttattgtgtatctataatataccagccactaaaaggatccagtgttattgattcttatactaaggcagatattgtgatactaattttacagatgaaataagtttaaacattattaaataatctaccctagtaaggggtcaagctgagttccattaggaaggaaaaactctttccttgacctcttggtttcagtggcagcagccctgaatattgaactgacaaaaaaataggataacaggagaaaaaggtttatttcatatgcatgtggatggggtctcacagaaataaaataaaaactgtagagaggtggtcagacccaaacacttggacactaattttacaaaagggcaggtcatgtcctttgcatacatagaagaaatagggatgcaaatttgcggagaaataacaagacaaagaaaaagagttttgagcttctagaggaagtaaattgtggaaaaataaatgtgaggaactaatggaagataagggtgatttagtaaagtttgtttctacggccccatcttgctgccaactttctgtactgttcatggccatgaaagtcccctgggaaaaaggattcatggcagtcctcgtttctcagaagtttctgctcttagtcagataagggaggttccaagaaggtttttttcatctcaaaatagtctgtatgccaaagtggcatattttggggtggcatattctgattcctttctgtttaaatccagctttgatgggctgacctgatttttatgctcccagggccaagtcagggctgctgcgatgagggctgcctaccaaagggcagagggatgccacgatgtctgttacgttgtccaacacgctgcatgcctccatggcccagggaagctcatatcacggcgtttcctgtagcacacatcttgctatcagtctctgtctcagtgtttttcttttattttgtccttataatatgagcatcttcaatcattaaacttcagttgttgatgcatacccacctttatttcctgaacctgctgggatgtgatggaaatgtatactgggtgtagattcaggttttatgagagtagatgaagtatcttacatcccagaaatgagccccaggaagacaggttgattatgaatcactgtagcccctcacaaagcttgcccatacaatactgtatcccaggtggtaacactgggcttctctctggatttccccaccttgaaactttttcctcatattctgttggtgggagtgtagattagtacagccactatggagaacagtatggaagttcctcaggaaactaaaaacatatagttctctaccatctgattcagcaattccactactgggtatatgtcgaaaagaaagggaatcaatatatcaaagagttatctgcatgcccatgtgtattgcagcactattcacagtagcgaagatatgcaatcaacctaagttctcatcaatggatgggtaaataaagtaaatgtggtatatatatatatgcaatggaatattattcagccataaaaagaatgaaatcctgtaatttcctgcaacatggatggaactggaggtcattatgttaaataagccaaccacagggagacaaatatcgtatgttctcactcatatgtgggaactaaaattgtggatctcatgaggatatgcagtagattggtggttactagaggccaggaaggagagagtggacaaagtagggaaaaggatataaatgggtttattaccattgaaccttacacttaaaaatggtaaaaatggtaccttttaaaatgttgtttttagaaaaagaaactttcctgtaaccagtccctggtacactcctgccctcatcctctgggagaccgtggtcctgaggtctcaaagtggttccctaaggacccaccagaggcattgcccagaagacagagacctttccagcgaatgcattgctgactgttgaaacttctccactgatttcactcctcaaaaaaagaaaaaaaatatgtttctgaattttgcaagcctttaagatgtaaatccttgcactgcattttcttatagcccaaattcatctgaagccttgggttgggagattgtttctgtacattaaataggggttaactctgagatcctgcaggatcctctgctttcttatgtgcaaagttctgctactcctgacagtcaagtcccctgctgcctgaacagctccatcttttgacaacccctcttttagcaacttccacgctcagctgtggtcattccatatgttttcctgggccctaaaagcaccaagctctcccagcctccatgccttcatgtctattgctttctccgctgggcacagccttcttccttgtctctctctcttgggtttcacctgaggcaacccctcctgcaggagatgtgctccgttcaccttgttccctgtgaggtacctgtcctgggtgttaccacactgcccagagctgacctctgatatagtacttggtatctacgagtgaacgtcaagtattagtttttccagtaatgtaagcagtttttgtaagagtcttattttacacaattagtatcacaaagtcattgaaaattcccattagaaatgtggactagaaacacttcagactttagctcagtccataatattgagctgagccacttgatgtaaaagctctttgtgagtttggttgtctttccttttgtattgttatgttttgaaaggcattgcactggtcattagagaaatgcaaatcaaaaccgcaatgagacactatctcacgccagatagaatggtgagcattaaaaagtcaggaaaacaacagatgctggagaggatgcggagaaataggaacgcttttacactgttggtgggagtgtaaattagttcaaccattatggaagacagtgtggcaattcctcaaggatctagaaccagaaatatcatttgacccagcaattccattactgggtatatacccaaagcattataaatcattctatgaagacacatgcccatgtatgtttattgcagcactgttcaccatagcaaagactcggaaccaacccacatgcccatcagtgatagactggataaagaaaatgtggcacatatacaccatgaaatactatgcagccataaaaagggatgagttcatgtcctttgcagggacatggatgaagctggaaactatcgttctcagcaaactaatacatgaacagaaaaccaaacaccacatgttctcactcataagtgggagttgaacaatgagaacacatggacacagggaggggaacatcacacactggggtctgtcagggggtgggaggctaggggagggataacattaggagaaatacctagtgtagatgacgggttgatgggtgcggcaaaccaccatggcacgtgtatacctatgtaacaaacctgcacgttctgctcatgtatcccaggacatgaagtataataataaaaggcattgctaagtgagggactttgccgccctagttttaatctattaagaatattatgcacagggcactctaggattctagaagtattaacatcaaatgtcatggatctctcaaaatatttctagatgaatgagtattgagttcggactttggtccgagattaatgaaagttgaattggggggtattttgaacaatataagacacactcaatttatgtgtgaatcaatctagcctggaaatgtaatattaaacgttgattatgttgctttgtatctgccgtgtctctttccaggttcaggcattagcaattatgttttcagaggcctcagttttcattctgtcttgggaatcaaggatgttagaaggtcccttccagagggcaattattttttggcatttccatgagagatgagttaagacaaggcttctcagaggtgtgctttgttattctttttctgattgacccttttctccctattacaactttggtgaagaaggcagcagtgacatttgtcctttgtatacattactgtcaagttttttattccatgtttaatcctaaagatgtaatggagggcaaggtcttttgctgctgtccaggggtgcccatttggttaggctggtaatgcaaaacttgagacaccatgtcttaatcgctgcacgctaaactgtcgtctcttctagaacgcaagcttgtttgtgtcaggaactgtggctcattcatatttgcatttctggcagctggcacagtgccagtgtatgtcatgtgctcaagtgctgagtcagtaatattgaacaaatgcagtgtggaaatagcatatctgacccagtagtaccccacaccgagtgagtgttcaaaaaaatattaaaccaggttaaaggatgaaaaagaagaaggaagtggtttggggtaagaaggggaaactggaccaggggaggagaagctttcaaatctccactcaatttgctgaggaaaattgagaaagccacttaatttttctttgtttatatttccccatctgtaaaactatgagatcatctaagatgacctccaaaatccctttttcctctaaaagtatgtctatgaaatgccaaaagattgagataggtgatgatgtattttattaacatgtatgaaaaatgctcatgtatagccacagaatgtttaggtctttagctttttttaaacgtctgtcaatgttcaatgggtgggatttctattttttcaatctgtcaatatttaataaaggtctactttgtgtgaagactgtgctaatgctagagatacaaagaggaatgatgatcagtttctaccatcaagaatgtgtgagagatcagtgagttaagaaacaacagcccttcggcataaaaatgctacagtgagggatgtcccttgtgctagggagtcacaggaaggagctgctgactctaggggatgacagagcaggcaactggattcaaacaattccaggcttccaagtaagggccacagcatatgccaagatttgctgatgtgaaaaggctcaatgttgtcacagaatggaagggaaggagggataggagacacaaacaagattgtgaccaccatgtgaaggtcacacacaccaggcttaggaattattttgaaactaactgggagccattaaacaacaagaatatggacacagttctatttgtacttcatggaaaaagttaataataatatggctgatgaaggaaccatttttttttctctgaagagtatacctggatgcctgttggagaatcccctgggtgcttattaaagtgcatgtgcttaggtttcaatctaattcaagaggatcataatttcaatgggtttgcctcagaaatccacattttaaaaaaactgtcttacaacttatgcagtttaaactgtgggagccactaggtaagagaatggagagttagtggcaggaaactcataaacattgaatctctgtgagtcccttagtagccggttgatcttagctaagatactcaacacttgtgaagctgggttttcccttctgtaaatgggtttaagagtacctgcttcatagggtttcagtagggattagtcgagatagcatacataaagcatctaatgtaccaagtttgggagcacattgcaatcacctagagaacttactcaaactctgtgcataaggtgtagaggactcaagaaactcccccgatgatatggattaggaaccagtaagaattaactccccttctcctaaggcagacagtcaagatatacaaaaggggatatccaatgacctaaatgattcttaaagttttaattcagatgactggttatatcaaagtgtagatggagaatgcagttctattttgaatatggtagtgtcccgtggatcacctgagtggagatgaccagaagctggtactgcatagtggacaaggacctcagaaaaaagcctgaggtggtgatacagagtgggctggcaagtggtagctgaaaagaacatagccccccaggaatggatgaggtggaggataagaggaggcttcaggactcaccttcacataaacaccaaaattttaaattgttttatgaaaaaggctgggcacagtggctcatgcgtataatcccagcactttgggaggctgagtcgggtagatcacctgacatcaggagttcaagagcagcctgcgcaacatggtgaaacccgtctctactaaaaatataaaaattagccaggtgtggtggcagccacctgtaatcccagctattcggaaggctgaggcacgagagaatcacttgaacttgggaggcagaggttgcagtgagccaagatcacaccactgcactccaccctgggtgacagagcgagactctgtctcaaaaaaataataaataaataaaacaaaaaatttgcaggaaaaaaaatgattgaagaaaattgaaaagaaataggagtaggaagaaaaccaggagagggctttatttgagaaacaccctgaaaagagactgtcaaatgccatagtaaaatcaagtgagacagaaagttgctctaacgcagaaattctgtcttgccaatgatgggctctttggccatggtagctggttgggtggcaggttgattctggagaaatattggtatctttggctttgtattcttacctgaaatgcctaataaaacctcagaggcagaaagtagttctttactactctttgagtgagaagaatacttccaagcatctcttgttctcgagaactattttttatatatacatcaaatgtactatgcaaactacaactcatcactgtgttttaaggatggccacatatatataactatataactgttctctatatatgtagaacatttatatttatagaacacataaatatgtagaacacatacatatgtagaacacataaatatgtagaatacacatatgtagaacacacatgtagaacacatgtatgtagaacacacatatatagaaaacgtgtagaacacacaactatgtagaacacgtgtgaacacatgtagaacacatatgtagaacacacatgtagaacacacgtatgtaaaacacatatatgtagaacatacatacatatatataatatatatgtgtgtgtatatatatatatgttcatcttgataatctagaaatggttgtgtcctgtggagaatcacaaggatggttcttagtacaaaaaccaacacccactcctaatagttttctttctagttgttaatgattgactatttagttacatctttattccttgttaaagttttttttgcttttgttttgttttgtttttagcagcagggtctcctctgtcacccaggctggagtgcggtggtgcaaccatgacttcctgcagccttgacctcctgggcttaagcagtcttcccacctcagccaatgcatgccaccacacccagctaattttttttttcttctaactagagaggcaaggtcttgctatgttgcccaggctggtcttgaactcctgggctgaaacaatcctttgcttaaacctcccaaagggttgggattacaggcataagccactgtgcctggttcttgatagagtttttaatatcaagatggttattcttctctggagtaagaacatttcaggataaaataatttacattttgaaagttaaaattccaagtgcactgaacttcatatggcagatgatgacaattagaccacaaactacaactcatcagtctgtttttttaggatggcctttttgcctcctagtaaatttgaaatatgcagctctgttataacattttcaaggagtcagcatatttgaaattctctatcttgagttttattatttggaattagcttcatttaaaactgttaacaaataatgaggagctgttcagcacattgttctgttctagggctaatacaaggaattgcagctcactatattttaagtttgaaatagcagtcagtaaagaactctatattgtcaaaatattattctatttactcatttactgaaggaatccaccaaatgagctatgcagtcatatatatttaaaaaataaactcatataaaagatgaggctggtgcagtggctcatgcctgcaagcccagcactttgggaagctaaggtgggaggctctcttgagcctagctgttcaagaccagcctgggcaacatagtgagaccccgtttctacaaacaattaaaaaaaaaaattagcgccaggcgtggtggctcacgcttgtaatcccagcactttgggaggctgaggcaggtggatcacgaggtcaggagatcgagaccctggctaacacggtgaaaccccatctccactaaaaatacaaaaaattagccaggcatgctggtgtgcacctatagtcccagctactcaggaggctgaggcaggagaatcgcttgaatctgggaggcggaggttgcagtgagccgagattgcaccactgcactccagcctgggcaacagaatgagactctgtctcggaaaaaaaaaaaggcagatgtggtaacatacacctgtggtcctagctacttgggaggttgaggtgggaggatcacttgagctagggaggtcaaggctacagtgagctgtgatcatgccactgcactctagcctgggtgacagagtgagaccctgtctcaaaaacaaaacacacacacaaaaaaacttatataaaagatggaaagaaaaagctaataaccaaaagagaatataaggaaaatatcaagatcttttttcagcagtgcaaagtttcaagcagagattgggctgtagtttttagttgtaggttttcctaagccagaaggagggatgggggaggatttaaggcttatctgaaggagtatatgtcaggatctttaaataaatgatatcttctctcattttgattagactaaagaagtcagttaacttatccacgtacaaacagggaccaggaatccagtccctgactcttatgactgtagcatgaccccgtgttttcacctaaaggaagaacaactttgagccgcagtacctttatctttagtatgcatatacttagcagccgcagtacctttatctttagtatgcatatacttagcagatacttgtgactttcagaaaccagtcaaagcccttcccagcaaatgcttttgaaaaagtggggcatgaacaacctgagtaattttatttctgatcagaacaatgtgaggccgggcacatgggttcacacctgtatcacagcactttgggagggaggggggaggatcatttgaggccaggaattcaagaccagcctggacaacataatgagaccctgtctctaaaaattagccagatgtggtgacacatgcctgtagtcccaactactcgggaggctgagatgtgtagatcacttacgcccagcagtttgaggttacagtgaggtaatatggcaccactgcactacaggctgggtgacagagtgagaccccaactctaagaataataaaaagaaaaataaatgctatgtgactataataaaataagaatttctgacttataactggcttttgaagtaatttaagaagagcttcccataagttctgagagctttgggatggcagggaaggtgtaggtctgtggatgtcttctgcctattctcattactccaggtaaaaaaagccctcgaggtccaggcattgggaaatgtgtaaactgtagcaagggctagaatttgtagaggaccagagtccatgcttgccagcatgaaagggttcaaattcaatttaaaaaaaaacaacaacttgaacccagcaggcggaggttgaagtgagccgagatcgcgccactgcactccagcctggcgacagagcaagactgactctctctgactctctctctctctcttctctccaccttctctcccccctactctctctgtccctctctcccaatctctctctcccccccacccctttctctcgctctccccccacaacccccactctctctctctccctctctctccctatatatatatatctcgccatgcaggcttaacacccttacctatggagtcagcccagtcaccatcatttagatccctgctttacagttacagcacattggtgtataaatagttattttagaatgtagtaagattggaaaataataaactagagttcgtgcttacttttatggatgacataggaccactttctggaggtgtaggatgttttctagccttatgctcagtacacatttcacagcactggtaaccaccccgtgggttcttctcgcctcctacccagatagagccaatttattgagacgcgggaattgccatagagaaagagtttaatacacatagagttggctaaacaggagaccagagttttgctattactcaaatcagcttctctaaaattcagaggctacggttgttgaaagatatttaggcaggcaggagcctagggaatggggaatgatgattggtttgggtcaaggatgaaatcacagggagttgaagctgtcctcttgggctgagtcagttcctgggtggtggccacaagacctgatcagccagttaactggtctgggtggggccagctggtccatcagaatgcagactctaaaaaatactcaaacatcaatcttaggttttatagtagtaatattatctatgggagcaattggagatgttaggaatcttttggcctctggctgcctgactcctgagccataattcttaatcttgtggatgatttgttagttttaaaagggaggtgtggtcctcaagcaaagaggaggtttgttttagggaggggctattatcatgtttacttcaaagttaaactataaactaaatttcttccaaacttagttcaacctacacccaggaaagaacagggcagcttggagattggaagcaagatagagtcggttaggtcatatttctttcgctgtcacaatttttgcaaaggtgatttcacgcaaagtatgcactttacaaacttactttgtttttagcaaaaagtaattgaaatcacttttgcttagcgtgcaaattcgttttttaatggaaattctgtactgcctttgttcattctaaagaaatcatcttgctttttactcacatgaggtgacattatctggatttattccttattttggatttggactgaaagctctttttacattttaaccggctgtcatttgcctgaaagtagtggtgaagggtgcctctttaaatgcatttacaacaaattgctttgttgtgaaggggagagtaaaactgaaattggttgtgtttccttctctctgtgtcaaaattgtattttccattttatgcatctggtgaagataaagattttgatgcttaactgcaaagatctgactctacagggatgtacttactctctcttttttgaaaatataatgatttcacagtctcctgccttgaacacactacgtttggtaactttatttcttgttttatcaagtcatgtatgacttttctgcttcttccttgcctgccataatcatcttctgaccatctgggaaacctctgatcctctatgcagagtccatttaaacattttagtactagaagagtgaaaatcttgtaaaaatataaaatttttttctattattacactgggagcaaaaataaaatgtttaaatgtgctttcctgctgagtaagagttttagagattacaggcttgtgtgcagaattctgaatgggggcagcagttcctatgcagctcgggaactggagaaaggctgcaggcattgtcagcaaaagggactggagtgatttgttgtattccctttattttcagaataactcctgataaatattagagaggcgtattcactcttcaaggcagtggaacaacctgcatgtattttgggagcaattcttggaagggatttctgttttaaaatcaagacattagcctttgggatgtcagattcctattgataaattgaggaaagtgactatcaggtgtcaactttggaaactacaaaaaaaacagttacctaaagggagggtaatgaaaataactgaggatataaatcacccagcctcagttttacgagccacacatgtgacttttatatttccattaatcacaaagctcataattttatgatacaaatatcagcaacggccgcctggagttttcttttttttccccttgtctctattttcagtttcttcctttatctgttttgttttcttttaattaaagaataaagcatttcttttttcgtgaagatttatgttaaataattataacaataataatttattgtagtcttagtacatatttttgttcattcaacaaatatttattgactaaatgccaggcatggttagacattgtctagtgggagagagagactgtctgcccttgtggagctcagagtctaatggggaagacagataataaacagtaatatagataggtagataaatagatacatacatacacacatatatatacatatgtattagtccactgctataaagaactacctgagactgggtagtttataaagaaaagaagtttaattgactcacagttctgcatggctggggagacctcaggaaacttacacttgtggcgaaaggcaaaggggaagcaaggcatgtcttacatggcagcaggagagaaagagtgaagtaggaagtggatataaataacacttttaaactatcagatcttgtgagaactcactcactatcatgggaacagcaaggggaaatccacccccatgatccagtcacctcccaccagacctctgacaagtggggattacaattcaaaatgagatttgggtggggacacagaaccaaaccatatcacatagatatatagctgataaaaagacagatgctataaagtgataaaagctgtgaaaagaagaaagtgtagcacaagcacaaagaaaccaataggaagagagagcaactgtgggcatctttaaatcgggtattcagacagccctgacagagtctgtggattttggacaaagacttgaaaaaggtagatatctggggaagagggttccaggtggaagaagagtggtgacatggctggcatatttgatgagtaacaggaggactgtgcagccaaggcagagtgaacaaacgtacattagatgagatcatttataccaagaatgtatggtatgcctagtgcctggtgcggagtcaacgctccaaagctgtgaagccccggctctgccttcagccagctttcacgccaaccccacccatcacacatgcagacacttcccaaggcaaccaagggctcgtggcttctagatggtctgtggaatttttgtaatgttgacatttgttgtgttaatgcctgtggctttcataatgctactttacattgtaccatctcattggtgttttgatgagcagggtttctttttgcctcttaactatggtgaggttttcagttaaaaaagagaatccctacacaactgcgtaggggtgaagagaactttcccttcaccctctaaaggattatttaaaagtcaagtcacaaaaggttgattaattggagaaaaggagtaaacatttataaacgtgcacacaagggagaatcacagagtgattaccccaaccaccaggagagtgtagaagcttatatatcatcttgatgtacagaaaaaatgggggttcaaaaacaggtaatgatggcagaacaggttatgggagggagagaagaggaggcctggctggcaaaggtagcagctatcaaaaagaatagatggggccgggcgtggtggctgacacctgtaatcccagcactttgggaggccaaggtgggtggatcacctgaggacaggaattcaggaccagcctggccaacatggtgaaacaccgtctctactaaaatatacaaaaattaactgggcatggttgcaggtgcctgtaatcccagctacttgggaggctgaggcaggagaaccacatgaacctgggaggtggaagttgcagtgagccgagatcatgccattgtactccagcctgggcaacaagagtgaaactccatccaaaaaaaaaaaagagagagagagagaaagaaagaaagaatagatggtaaatgctttttttcttcttaaacctttaaaggtgtcaaactctccattattttttttttagaatgggtcaaggggaggcctggctgcatcaatttagattttctgtaggtgtcaagtcccccacaaaagacagctttgcagagttacttctgtttgctgggtctctgagcaagcagtctcaaactatgtcaaagaaatacactttggggtaaaatatttttatttctttcggttgatagtagaatgttttgtcctactgcaaatagttagcagatctccgatgagagggaattttgagaatttgggaatcagtttcagaacctctgatgagagggaatttttcctgcatccttttctgtctttgaagtagtggttttcaagttagctgcatgttagaatcacttggagagctttaaagaaaatattgctacccaggccccaccccaaatcaattaaatcccaacctgtgggagtgggacctgctattagattttgagctccccaggtgattctaatggatgccagggaggagaactcccactggtcaccgaggttgatgctaagtatatttatttttttcttatgatacgttggcttctgcctcttcatattatcatgtctcaaaggctcagaagaccttggaactttctgcaacacttctcaatcttctcattccagctctattggtgactggttcataaactccaggtccagaagcagagctggctcatgaccaagctttgctgtgtgcagcagccttctcagttgcttgctctgggcaaccactcttcagatgcagccccgcagggctctgaaagcagagtgtgtccttcagcaccccctttcctgaagatgtagctagctctgccgggctgcctccaccactttcatggcatcagctaaccatagtgcttccattttcatcaggaggcttatgcataagcttatatttaaaatgtggtcagaaaaatgtctacaagtagatatttgagctatacttcatgttgcactgttcaacataaacccctaattgacccacttctaaaaaatcacctgcaatataataccgtcaataaatggatgttaatttttttgtatttatattttaaacctattcatacatctcagtgtatgtgtgttgtaaatcaaagatgaccgtggcaagtcacaattattttaagaggtttatttgccaaggttaaggacatgcctaggacaaaagaacacaaaatcataggaaaaatctgtggtctgtgcttttttccaaagagaatctgaggacctcaatatttaaagggaaaaaagcaggtattgggggaaagagaaagaagaaaaatctttttaaagggtggtagataaaagtggcaagaggttgcatcctttttagtcttggatcagcattctctgaatctacattttacatgtgagagggggtagaggaatagtcacatacgcattcaacttgtcctcagtgaatctgcattattacataacctaaaattaacagagggtagaggaggcagtaagataggcatttgtctcgggtgagtggagagatgacttttcagttctgtcctttgtcccatacctgagaagattaacgatgaatttacacggtcagggtaaaattcaccagaactgctttagggtaaagattgtggggccaaccaggaattcccttgtgggaaaattgtgagggaggtatataccctttcatctctgtagctgtcttatttaggaacaaaactggggggcagatttgcatgacccagttcccagcttaactttcccctttgccttagagagtttggggtcccaagatttattttcctttcatagtatatacacacacaatcatttgtatgcacacatatacacttatggatgtgtatttgtaagtatcagtatttatttatagggactatatataatctttccaaataatcagtctggaggtcagctgaactttcttagactctttttatcatgcagttgtgtgttttttcaatgaaggtgagagatgttaaaatgatactgtgttgataatgttataattgaagctctgggattctctccctggcaaaataaaaagtgggtgattcagtattgtcttcaggttatttttctttaattttgctggtccatgatatttaaaaacaaccacaaacaaccctgggaactgtaagttaggctggaagcccccatgttcgaggagggcttctctggagcccctcctgccccaattctgctcatagtccaagtccctcagtgacatcaggggagactgaaatcagcaagacagagtcacttgcctccacccctttccccagaacatcccaacactaggtgtaatttcatgatttagcctctcctacctctgtgctaaaataaagtattacttttctccatccctttcttcccttttctcttcttgttccccctttttgaagtaaaagcaacattcccacaatttaaaaaagttatagcctagatgaagtggctcatgcccgtaatcccagcactttgggacgtcaaggcaggaggatcacttgagcctaggagttaaggacggcctgggcaacatagtgagagaccccatattaaaaaaaaaaaaattaaaaaatcaaaagccccaaaaagttataaaatcctttttcttgaccagcacacttgacatttccctttggcaggcatcccacatcccacgtcgggattcacaaggtacgagatggttccaggaaccaagatgcaaactaagaaaccagttggcctaacgaagtgtcgaggcttgctggtcacagagctctccttctctctcccgtcagcacacttgtctggcagctggcccaagagtgtccaggttctggtagtgcccactggcagcgtttggcaggtgtgacagcagaggagtcggaaaaatagcaaatctggcctcccctcccgcaggaggaacacggcgggactcagggtgctggctctgtagaagaacatgccctctgcaggccatcccacctctggtcctctttttatcctgggcaaagaagtgtcttaatcccagcctgtctgagcaccgccctttcttctacactcacactctccttcacagccccagggcacgtcattttgtcctacacaatgccattattactccctttttgtttgtcttcttaggcgagccacttttaaaaaatattccaatgttcctattccaaacctcttctcccctttcaagctcagataaaggcaccgatataagcaaagcttttttatgcctccttgactaggtacccagtactaagttcccagaactgcagtcccatgaacagtagcattcagaggcattgaggagcagagggaaagtgacttgtcactgatcccccattgaaagggctggcatcctggtcaggctgacaggctctcaacccttcttcctctctgtggaacatttctctggcatttttctcagaaatctcatgaatgccctggaatagagaatagagtttattttgaacatggaacatggccaggtttttttttttttcctttgaaatgagattcttagctatgaacctatttcttttttaactaccttctgacctagttcataatattaccaccagaagcagaactaacaaagaacatgattcttgcttcaagagattgaacaagtaataggacatagagttttaaaagaaaatcaccattcattctgagataagataacttgcctcaatttgaacttctctttgtaaccgttagggatgtaggaaagggaagagacttatatttttctagagaaaaagtgtttacaaattcttgaatatttcccaattataggttcttttataaaaaaatgaagtgaatgtgttagataatttaaaattattaaatgttatgcatatgtgtgttcattcacaatagcaaagacatagaatcaacctaaatgttcatcaatagtggaggccaggcgcagtggctcatgcctctaatcccagcactttgggaagctgaggcaggtggatcacctgatgtcaggagtttgagaccagtctagacaacatggcgaaaccatgtctctactaaagatacaaaaaattagccgagcatggtggtgggcgcctgtaattgggattacagctacttgggaggctgaggcaggagaattacttgaacccaggaggcagaggttgcagtgagccaagattgcatcattgcactccagactgggtgaaagagcaagactctgtctcaagaaaaaaaaaaaaaagtagactggataaagaaaatgtgcatatacaccatggaatactatacagccataaaaagaatgagatcatgtcttttacagggtcatagagggagctggaggccattatccttagcaaactaacacaggaacagaaaacaaaataccgcatgttctcacttataagtaggagctaaatgatgagaacacagggacacgaagaggggagcaacagacactgggttctgcttgagagtggagggtgggaggagggagaggagcagaaaaaataactaatgggtagtaggcttaatacctgggtgatgaaatagtcttcactataaatccccatgacacaagtttacctatgtagcaaacctgcacttgtaaccttgaacttaaaattattaaatgttaaataatctaaaattattcaataattaataaagtttatatatcacctcaatgttaatatagaattattatctaattattcatctaaccagagatgattacaaggcataaaatgagaaaaagttgaagagaggtttcaaaaatatctcgtataaccatctccccagttcaggagacctgttcttccagcctcaaccgaaagccatgaaggtgcctgcaatagtggagggccctctgccaggagagaatgtgctccagtaacagagcacactgtttcctgaaggagcccctccactgttgaggtttctgttataagctctattgggtacaaaatggcgtctcaaaatttgctgcccccaaaatgggcactcattttatgcgtgctttgtgcttaaaatacagtaaatcatttaatgctcaaatactaatgacaactggcatttattacataatcaccatgtgctaagcactgtgttaagcactttacatttattgtggcatttactccttacataaatcctgtggaatacaatttcccctcctttttccacacgaggaaacaggtatagaggacttaagtaacttacgcaaggtcaccatggtagagaatgactgaccgaggattcaagcccaggcccatttgacttcaggacccaagccactggttatacttttcacttcaaccctattaagtgtatgttgaattcctatatacaaagaactgaggctgtcttatcaaactaattttcccgaggtaagtggagtcttaaagcagatctctgattcaaatcttgtgctttatgccatcataacccaaccagaatgcagcagagagcatcaaaaaattaaaggagtggggcatggtggcatatgcctgtagtcccagctacctgggaggactgcttgagctcagaagtccaaatgcagtctagacaatgtagcaagatcccttttcttaaaaaaaaaagttatcctccagtaagttgtcaaggcaactgccgttgaggacttgaggatctcaatacccactggaactgcattattatttcaattcaataatataaatattgaatcctagagctgccgaggatgttgaagactcttccccaggcaaggtaagtgagtaagcctgaagggtagaagggcatttttcttctgtatttcccgaacgtctagcataatttttaaatcattgtaggtactcaataaatgtttgttgacacactaaatatatctaccaagaaatttataatttcttgcatatttaggcaaatgtcctttccggtattgtttattgatttagactccatgtatttccaaaaggaatttaaagtgtcttaatttccagtaggtttttatttttatttgaatcatctggtgttgattaattagttaagttttggtgcctaccttatagtgtttgttttctctgttaaaagccatgacagcataaattccccactgcagaggccaaacatctgacagagccagagaaaaacaccatcccaggagtttttagtcatccacagcagtggggcaagtctggctgtgtgttagaatacggaaatcctcaagtgggtaactgcttggccaaatggtgtgggaacacaataaggaaaatgcacagctcttctatgtgttatatttcatttacagaaattaggaagcattttaggctgcagtgacaattcaatgtttagattttttaaatgattctatgtaaaaatgcagctttctatcagttggcatacaataggggctaacaaagccaccactccaacttagaaaaaaaaaaagtttgtgatcagagttaaattagtaaaacaattaaaatcaggagccatctgtgggagagagtcaggagatccatctttaaatatatacctgaatactttagaggcacccaatactccagtcaaggtgatatgggtatattttcagaaaagcagagctattccatgattagaatttgaaatgggaaatggtatcttatttggaggaaaaagaagaaaagagaaagaagcgataggaagagagttagtctaccatggaaacacatagaggcacaaaggcaagccctagttgggagagaaggagttttcctggagggaactagaggacacttgggcaagtttgttcctgtaataggtgaggtgattcaagctaccttagatcagaaacacttctgaagaccaatgatcttccctttgtgctgactccattcttacacaagatgttggatcactgaggtttcaagcagcttgtcaacagtgaggatagatgctggccagacctacttgtgcattcttggctgtggtagattaatgcaaagccatctggcttgtatctctttaagcttgattaatgcagtttcacatcccaatttcagcatgctgatcaaatcaggtttctgagccatcatcacgtctgaaaacttgaccttgaggtgatggattcaccaaggcttagccactggtaaggatctggttgagtgatcagccaaccttctcgaggttgggaaatttctttcagcaataccaataaccttgaccacgagactaatgttcctggattctcttgctagttgcttctcaggtgaccactaaagtgaccactaagtctaggaaaaacgcctttgatgtctggctcagataactgctctactatgaccttcactgtcatctcttgctgccaagttctgttatctcaaggtgatattcaccttgaaaaccctgcaatggctgatgctgttgcacccagcactgcagctcattgacttagcagcgtgttccctagtgcaagatccaatgaagcacattctctataaaaacagaaacaaacaaacaaaaaaggcattgtatttgttcatcaaaatggaagataggcaaaaagtaaaggaagattttttgttggaaaaggtagaactaggctcagcatttgaccaaaatgtgggaaatgaaggaggcacacaatggacatgggttatttgagaagtagaagatagcttcaaagagagaaaaaggtgcctttactcctctattattttatcaagcatgagtatattcacattaagcctggccaggcctatattaaaggtaagacttaagtcttattgtgtaactttctcataatgccactagaataaaaacttcattagaccttagataggtaatgagaacagaaactgctcttaaaagttgtgaacaagcatgacttaggaaaacaaaacatgagagcaaaagatctacctcatatgttaagtaacatataccctttatggatgagagatacacaatagcactgcagaggaagatgggcatagcatagattaggcaactgatatttgtgggtgtgttggggaaggaaaagtttgtgattaaagcataattaaggcagcattgtgccacatgcattgaagactcctgacggagataagaaagataaggaactaaatttatactctgcaattgtactatttttatgatagtggccaaagtttattgagattttcctacatgcaaagtctgtgctaaatcctttatgtacattgtctcatttaatcatctggaaaaccctgtgtagtgggtacgataaggaagaagcttaagaagatatgtgatgaggacatcaggaagatggcagactaggaagttttaggtccttgttttcccaaggaaatgttaaataagagactgattaaataattttatagaagctctgggaatcagtcaaaaatttataagaacgaagcaaatacccaactaagaaaaatccacattaaacatggcaggaaattttattgcatttttactcacccttgccccaccctgccccaaggcagcatggcagtctgggggatgtgatggcctgctgcccaatttccttctgcaaattggagagatttagaccatatttgcaatgttctaccctgtatgacagaagcctgggagattgacctctgcgttgcttaactaggagctcagacagctaaaagtggcacagtttggatttcaggctagaggaagataggagaagaagcaggcatggcttgtgaaaatcacaagggttttatagacccacagatatctggggcaagagatctttgagcaatacaatagaacaggtgagaccccaagaagaagcaaaggcgagactattagagaaattgagacattaaccagctgtgtatatgagggaatcagaaaaaagcgtgcacacaggtccaaggaagatacgtggctagaaaaggccttcacagagggcctattagtgaaggtcttcctctgcttagagtcagtcttcaaagactgggagaggtggctatttttttcaaatgcccaattttcaacaaaagatcacaagacattaaaattaaaaaaaaaatctggcctattcaaaggaacaaaataaatcttcaaaagctcgaagaaacacaaccatcagacttactagacaaagactttaaaaccactctcttaaatacacttaaagagctaaaggaaatcaagaaaagaatgtatgagtaaaatgagaatataaaaaaagtagaaattataaaagtcaaatagaaattctggacagaagaacacaataagtgatttaaaaaattcaccagagatgcaacagcagtcttgaatagacagaagaaagaatctgtgaatttgaaaaaggtcatttaaaatcattgagtctgaggaataaaaagaaaagagaataacaaaaaaatgaacagagcctaaggaacttgcaggatcccatcaagtggacctacatatgcattatgaaagttccagaagaagagggaaagagtccagagagattatttgaagaaacaatggcagaaaatacccccaatttgaggaaagacataaatgtacaaatgcaagaagctcaaagaaatctgagataaacctcaaagacccacaccaagttagactgtcaaaagccaatgacaaagagagaatcttgaaagcagtaaagtagcctgccacgtacaaaggatcctcaataacattatcatgtatttcccagcagaaattgtgtaatttgcctgaaaccaaacaactaagaaaaggtggacttgaacccaggcccattagtgcaaagctcattctcttaaccagtggttctcaaagtgtggtccctgggcctacagcatcagcatcacctgggaactggtcagaagtggaagtaaaaattctcaggcttcaccttgacctcctgaatcagaaatgtctttaataaaacctgcagatgtttgaactgctcttaaccattacacaatggatgcactccttgaaaatgcttgaggattttttctttttcttctcataaaagtatagccatatatgaccacaacccattatctgcaattctgaaaattcagaaaactgaacaccaaaaaaacttttttttagtcatttgtggtagcaaaattcttacctaaactaataattggttacttggcgtttttgtttatcctgcttagtgtggatattcatgtttcattgtaagggtatgattgtgtttaatgacagtgtgttgtctcataggctgttgagggtttttttgtttatagtatatatgttataaataaatatgctctagtaactggccactggaagaagtaaaaattaaaaaataaacacacgtggccctatgagtttcacataaaagattctggatcacttcagtaaataaagattactgggatatgattttggaagcctgagttaaaaccagactctgctaccttgctaccttgaaaagcaatgagctctctctttgccttggtttcttccctatttaactagggattaaagtaactaatctcataatctcctccagccccatccactagagatatacctggccatacttggagcacagatttttagttatttccttaattctgttattttctcagcaggttactcttcatttgatattatcaggttggagcaaaagtaattgtgatttttgttattacttttaatggcaaaacccatgattacttttgcaccaacctataagatgctttccatcttcctctccttatcttggtgcaagaaaactaagtggtgtgaccatgtgtatacataaatatttttaaaaggacctcccccaaactcaatcatgattatttgtgttataggggagcctaagaacaggagtgacaacttttttaagggactgttactacccactaagttcagagagacttggttttattaagtatgctagaaaagaaataaaagaatcccactggtctttctgggaagatatccaggagtctcctatccaagagataggagtcacaggctgtctgtacacagccagtagaagaggagtgagacaggacccaagatgatagactgtctgctctcagcgtgtgtgtttagggaacatgagaccagaatgagacacttcctgcaatgcaccctctaagtcttgacagcatcttgtacaattgctgctgctgactttatgccccagctgtgcaaggatgcttttggtatggagcccctggtgaggatgactttttgctggaaaaaaaaaaattggtcctgttgatcctgcaaccaagtaagctttggcatttaagtgtgaagactgaaaacccactgttgagtgagctgttatcctgatttaaactttaaatggtacattttgccttttcttgtgacaaggtgttctttttgaccttctccaggtaaaatatttttccatactctaagaataaaaaaaactcaataaattatttattcccgtcaggcaggagcttgctcaaaatatctatattgagcaattataaaagccttggaaatttccatcttcaaccttagaaatgactgattgaattccaattagggaatcatggacaggagagaattggaaggagaagtatttcctgtaacaaagtttgaattataaaaaaaataggccaagtgcagtggctcatgcctgtaatcccagcactttgggaggccgaggtgggcggatcacctgaggtcagaagctggagaccagcctggccaacatggtgaaacccgatctctactaaaaatacaaaaattagctgggcgtgatggcatgcacctgtaatcccagctactcgggaggctgaggtgggagaattgcttgaacccaggaggcagaggtttagtgccattgcactccagcttgggcaacagagtgagactccatcttaaaaaaaaaaaaaaaaagaaaagaaaacttagtctacatcaagattgcccaaccctccttattttgttgttgttgttgttgttctgttttgttgggttttatcagcccaaggccatggtttttaatttctgtctctagtagtaagcagaaaagcgggatgaggaaggggctttactggcccaaccagaccaaacacagaaactaagaagccatgactgtgttctctcccttgggcacccctgctctacatgctttctatggcctcttcttcctgaatgtattctttccctccattcaaggttccacttgttaaatatgatcttcccctctcacggaagtgccactgtttccttgatttctcataagtttcttcctctcttattcttgccttaggccatcttctcatctttttccccgctccactttctcccccttacgtccccgctcctccttccatcctcccctcccacacactcctccaaatcccaaaataacgagtgcagaagaggatacatggcatgttcaagcttgagagttgtggtcagggttaagcaagcgagaatgagagtgattcttttatttttcccacacttgagtgattaggctattactgtttccctttaggataaagattaaagactgttaaaaagttgttaaattcttaaaaaggactaattttgtgactcccagtagtaatagtctgaaaatgttcagaggtttcgaatttaatttttttttcatttcatgtattttaaactgaaatcatatcattcacatttaactgtggtttcattctatgagcaaattatttctgatatatatagtatatgtatatatgcatatgcacactcacttctgtacatacaactagatttgtaataattttaatatgtttaaataattttatgagttttaaaagatatgattcatcatcttaactctggaaggtacctttaaaagtatctcttgcactctcatcattttacagatgagtaaagttattttcaaagaaataatttgagtagcagacagacttcggcctggtttcaagttcctgagactcctagttcatcattccttttactaaaccctaatgtctcccacgcagattctaattatatcttatgaatttttaaacttccaagattagagaattgcaagattgaagtttttcatagactagttgtaatgagagcaaatataaattagaaggtgattggaagtgaatcagaagcctgaatttatagcttctaggatgctacttaaattaaaaagttaattataatgtgaatatgaatgaaaagtttattgctcattatttaaaatatttacatatttataagaaacttcatagaaaacacttggatgttcatttttcttgtgtctataatacctagtaactgttatattgtataatagaattcattagttttaaaatatgtcagaatccattgacacgtcaagtagagaaattatatcccctggagccttgaacacttttgaaggattgataacagctcctggtgaaaattgaagctagatttggtgacttaatgtggtcctttcagggatagaaatccatccatgtattaatggagtgtagacaattattggtggtgacaatcaatacgttttattagatagcaaaaggagaacaaaggagaagcctgactcgcaaatgtttatttctattagcattcagtcatccttacctcctagtccataccagggctggttttgaactgttgtcctgatacagtcacatacacacagtgtgagagaagcttccaaggggggatgtttgagcacgccagactttagtggcagacagacaagatttaaaaactggttctgctactaacttgtgactctgggcccaatacgtgacacagttgcccaaacctcattgtcttcatcttaaaaacgagaatgctaagatttgtgtcccaaggtagtgtcatcatgtctgcaaagtacttggcttatgggcctctcaataagtggcagcgattactatcatcatcatcatcatcatcatcaccatcatcatcaccgtcatcaccgtcatcatcgttttgctattttgaaatgcgtgactatatgagtatttatgtgcatttttctaggaatagtttctagtgttcatgattttgaccatcccttgatttcacctttttctaagttgagcagcagcatccttttgacaggtacccatcagttatataatctggaagttgttcagctcctcatggcactgcatgctattaaaatacaggagaatccaacttaatattctgtgtccagaccacaagcacagttagcagacagaggtttcctttccagtgacttttcaaatctctcaccagcaaggaatagaccattgaaaaaaactttgccctacaaattgataatgagacaagagcagatggcgacttagcctaacacacatctcttaactaactccttgattccttctccaggaagcttagtataatttcactatcaaaaattaatgataagtatgtgatatcatatgtgtttcatggaatgggtttagctttatatgggttttctgtttttagcacctgtacctacaaagagtttgtttgcgtaagtggggtgtgtgtgtgtgtgtgtgtgtgtgtgtgtgtgtgtgtgtgtgtgtgtgtgttttaataaattcttattctctttctcagtgtagcattccttggtaatatgagtgcagttttctgtttgttacatggtgggcgagttggttcatttctggataaatggcaaattttaattttgtatgttctttcctttttatcttagcaaatgcttctttgtgcaggcagacaagcttagattatgttaaaatatatatatatcactggttagagaccaccatttcttgcttccagaacagtttcacaacttgatctctcatccctgccagcatgagccgttttcagtcaagggatatccgtgtaatccacagggaattccttgatcataagcttagtaggctggagcatggaaggggaggttcaggatcacagtaaccatatgacccatcctaagaagatcaagtactatgtgtgtgtggtgggtgtgaatctcagcccagcaactcagatttaaaagatactccattccaaatctttacttacctgccaagctgatgactggcaggaattcagtctcagccctgactgaccaaggttgtacaagatcctggagtctttcccagcagctcaggacccctctggttatatgtgtttgtcccagctagttgtcagtagaacccatcagcacagcctcatgtcccttcagttttggggactggcaaagctggagtcccagggcctagagtccagcctttgtgggtacacacaacatttgacctctgagagtctgcctgggtccaggtggcgggtcctttggtccttgcaagacccatggacttccccccctttccagttgtgaggaccttctcctctctaccttggtgcatctccaaggcattcctctccagacaccctgtgtcatctcttcaacagctcaggatttgggaagacaaaatactatatagaaatggaagtgcactttggaaggccgaggcgggcgggtcatgagatcaagagatcgagaccatcctggccaacatggtgaaaccatatctctactaaaaatacaaatattagctgggcatggtggcacgcacctgtagtccaagtaggctacaggaggctgaggcagaagaatcgcttgaaccatggagatggaggttgcagtgagccatgagcactgcactgcactccagcctgggtgacagagcaagactccgtctcaaaaaagaaaaaaaaataagaaatggaagtggcttgtgcacagtctccgcttttagccctggatgaaaactgtcttgaggtcctgtcttctttcagatgaagaaatgaaggaaatatgtatcttagtaaattatcctgcatgttttgagagattcaaacatagaaagttaaggaatgtgtgtacaggaaatatttaaatagaaaatagattagctacaaaggaatgtgtgtacaggaaataacaataactacagttgcagaaaatagcatctggtaccagttggtgaccctggggcaggacgctggaacacacagcaatcaggagtgggattactttacactggggatcatctgtactttttgaagtttcttaacctatgcatgtaatgatttctaaaaatatgaagaagtttgctggaatcttaaaagtgcgtgaatagatttaagtcacaattattttattttattttttgagaaagggtctccctctgttgcctaggctggggtatagttgtgtgatcccagctcactgcaacctctgcctcccgagttcaaatgatcctcctacctctgcctccggggtagctgggactacaggtatgctccaccatgcccagctaatgtttttgtattttttgtagagacagggtttcaccatgttgcccaggctggtcttgaactgctgggcacaagcgatctgcccacttctgcctcccaacatgatgggataacaggtatgagccaccaatccagctcacaattattttcattaccaaaaactgttatttgttttatagaaacattcaatgaagaaatctgttctgccaaaaccatttgaagtttttcctgaagttttatatcaagaaaataataaaatgaaaaaataccggattttaaaactttgacatattcaaatttagatttgttaattaaaattctgtgtacatagaatgtttcttatagaaactaatttattgcattagggaaatattcctgcataggcttacgtgctacttttgggggtctgaaagtgaatcaacttgcagaacttatatcattatctagcaagtttcactcattacagaattgtctcatccccttcaatgtgtcaactcggaagaaacttaagccatattcagactgtgaaaagatacatttagaaaaactattttaaacctctggaaacagcacatatttggccagatgatgctgatcgcccttggtggacttgaaatatagcagccaaaattgtcttctgtgctgtgtggccaatctgcagtgaagagggcccgttatgtgcactcacgagaaaacttatgatttacagtccttgcacccagctgggccacatagttgacacttatgcttttgaacatcattttttggttctggaggtaatggcagctttaatggtatacaacttttctaagcaagaagttatgctattcctttgaggaatctttcccagatctggtttcttgcaaggttttgaggagtcttattgaggcacagaaaatttaccccagataagcatcagacttgaaagtagccatcagtcagcttctcatttagctggtgtcggtggggtacatgtcaatttgacagagcccatggtgggcaaaaaagaatttgcaaataatgggatttattaatgcagcctcaacttatgaaaattactgagattcaagacactagaggaaagggaaaaatcacatataatcgccctctcgtggaaaagcacttgacatcatccttgaacaatgatagagcagagtttaattgctttgtagttactgggtaagatctggtgtcaaggacttgagtctgctctactatctttttcctggctcttcgtttggaaacaaatactagcaataattgatgataagtcctcagttcctaagaatgtcactgtgctttaatttgaagaggcaacttgaatccaaaaatgtgcttgagtcaagcatttattttaaaataaataaatccaaggataaatcctgaacctacagatggaccaacctcctgtgtcttctaccaagtacagttcggaggccctaaggcaaactcggatgtcataatttcagttttagaaaatagcatttatacattttagaaatacttttaatgtgggttgaaataaaaatgattctctagataagtctggcttaattagaaaatgtaatgagctccatttcctagtttgcctccaagttgtaacttcaatttcatcttgtgggcagtctcaattgttagtagctgcttgaagcaatgggctgagagagacggcgaggccaagggcaggctcaggaaagaacagtgtgattgactatcattgccagcattgggcgtgtgagtcaggagagtcagcatgtatttgctattttggctataacttttctatcaactcaggaagagaactggaattcttgagctaatgaacaatgcctccctcatgatcattttctgaaacttatgttgtccattgcaattgttcatcacagattctggtgtgtcaggatggccgagcggtctaaggcgctgagttcatcacagattctgatattcggtcccctactccatcaaaatatccaggagaatttcatatataagaatcccaacccatgtccagactctacttttggggtctctgagatggcttaataaatagtgtaagggggtaaaaatttccctttacccttctaaattctgggctgagatcacctgctccaaaaggcagattaagaagaagaaaaaacaaacagaagcttacatgtacatttcatatgtatttgggagatacccagagaatgagcaaatctctctcatttttgaagtttaatttaaaaaaattttttacaggcagagtcttgctctgttgcccaggctagagtgcagtggcacgatcatagttcactgtaacctcaaattcctgggttcaagcaatcctcctgcctcagcctcctgagtagttaggactacaggcacatgctaccatacctggctaatgtttaaagttttttggtagagacagggtcttgctgtgttgaccaggttggtcttactctcctggcctcaagcagtcctcttgcctcagcctccaaaaatgcttggattacaggtgtgagccaccatgcccagctgagaatgagcaattctcaaaaaggtgacttctaactctggcttacatagcatcttcagtaaataacaatacatttttggagaagtgacgagacaaaggaaaaagacctagagtctgtagaggcaaccaatcatgggaacgcaaatgcagtcatacatcacttaataatgggtatctgttctgacaaatgcatcattagcatagcctactacacacctaggctatatgatagagactgttgctcctgggctacgaacctgcacagcatgttactgtcctgaatactacaggcaattttaacacaatggtaagtatttgtgtacccaaatgtatctaaacctagggaaggtactgttggctgggtgcagtggcttacgcctgtaatcccagcactttgggagaccaaggtgggcggatcacctgaggtcaagagtttgagaccagcctggccagcatggtgaaaccctgtctctactacaaatacaaaaataattagccgggtgtggtggcaggccctagtaatcccagctactcgggaggctgaagcaggtgagttgcttgaacccgggaggtggaggttgcagtgagccaagatctcaccattgcactccagcctgggtggcaagagccaagattctgtctctaataataataataataataataataataataataataatgttttaaaaaataaaaataaacctacggaagggtctgtaaaaacacagtgttacaactgttgcagtcttatgggaccatcatcatatatgtgatccgttaaccaaaatgcgtgactatataagaaactaatgacagataaacgctagttaattaaggttgttatgtagattcctctggggttggtctccaggctgataagggtctaaagttgtctctggtgttgaacattgtccttcctggtagagaggggaggaagacacttttgtaaactcatgtcctgcttttaggcaaatgggggagacagagatatttccctgtgttttcttctctattgccttcagctcaaaataatccttttgccaaagtggcatattttcaggtggcatattctgctccccttcaaagccatccttcttcctgaacagattgacaattctgacaaggagtagcagatgcaggccaaatgatcgccttaatgacaaaggctaaattggaagatgtagcttaatgtgagatccaaacatcttcctcactgaaccccagaactaggtaggcttatcacccaggcacagccagtgctagactagggcacatctggacatgaaggggcttgtccaggcaagacttgaggcatgggtgttgagggtgggataggtctcccaagaagaagcaagggaccaagctgataactcttcctcagtctcacaatcagctcattcattcctcctcctagggcagtgtgagtaaaggtttggagaaagatgaaaggcaagctcgcgtgacatcacacaagcatccttgaacctggaagacggcattaggaatggggcagatgaatttccctcaagggtgcccatatttctatctgccttaccttaaaaatgtattccatatctctccacttttccccatccccagcattcacacggtggttcaagctgccaccgcccttcgccgaggctccatgctatcgcagcggtcttctaattgttctcccgctgcaacccttgtcccgctgcaacccatttctgacaaacatcaggggtcatcctcgtggagggtaaatcagatcatgttccacccctgtccaatccactgtgtcttttcatcacacagtataaaccacaacctcacaccgtgtccaatagccctgtgtaatttaactcttcaccaacccctttgccgtccccccaactctgccccacctcactccctagatttaaccacattggcctccctgatgttcttccaacactccaacctcatttctgccttgatttcttcttctttctttctttctttctttctttcttcttcctcctcctcctctcccgccaccccaccccaggctggagtgcaatggtatgatctcggctcactgtaacctctgcctcccaggttcaaatgattcttctgtctcagcctcctaagtagctgggattactggtgcccgcaaccatgcccagctaattttttttttgtattttcagtagagacagggtttcaccatgttgaccaggctggtttcaaactcctgacctcaggtgatccacccgccttggcctcccaaagtgctgggattataggagtgagccactatgcctggctgatatcttcttggttgatgttcctttctgttctgagcactctgctcacaaattctttgcatctcatctcaatgttacagcttcagcaggggctttcctggctggcattctaaagaagcaaccttttccttaatgtctgtcatttcatcctacttacttctcacacctgccatctttttatctgtgtgtttacttatgtattcgttgtttcctcccccagggcaaataagccccatgaaaacaggggttttgcctgggtgcctttcagcacttggagagctcatcatggatttggcattccataaatatcaatttacagggtataaatacatgaccccaaaatcatcagacagattatgtcctgaattttaatgcagagaatacagttgaagtaatgattatgtcttttgtaaaaaacaaaaacaatcaaacataacctggcagtgagagaatacgtcctaacagaaagcaactctgctagcgaatctggaattcactgtcatggacctcatgccccaggacattcatgacttggggggaaaaacacccagaatttggtccctctgcctggatattttgttttgaaacttggaagaggcaatggagtgttgtgattaagacgatacactctacagtcatattgctgggcttaaatctgggcttcatcactcactagctgtgtgcccctgggcaagttacttaagttccttgtgtctcagtttcttatcctcaataaatgctcattggaagtaataggagtataatggctacaaaaaatagaatgaataagatctatttgatagcacaacagggtgactatagttaataatagcttaattgtatattttataattacttaaagagtgtaactgcattatttgtaactcaaaggataaatgcttgagggcatggatgctccattctccatgatgtgctcatttcacatcgcatgcctgtatcaatacatctcatataccacataaatggatactcctatctacctacaaaaatttaaaaaattaaaatattaaaaaaaattttttaatgtaatagaggtaataatataattacattttgctagctgttggagggtagtaactgccttataagttgtaaccacttttttttttttccaatcacctgtctttctactgtgttagctctttggggacagtgtcaagatctttctattaatgaggtccctgctcctttgccacatcttatattagtgaaatatcaacaggtaggtgcattacgttccaccgttttcctcttttgtcttcatcctcctcaagtttctttctgattgttcctttctgggtcagtagttagaaatattaagccagttaaaagtgtgcccttctgtcaccacagttttcctggtcagtaagattggcagagtggcttatagaataaggagggggctccttgctagaataaggtaagagagctgccacttgcaccttccccccttctccagacaggataagcatctcagtccaagctgatcttcccctctaagacagtagcctctgctttcaaaatcactctgcttagttcctctgtcgacccaaagtgtgcttgtagcataccctctaagataagacaaaggccaaatctagctttgtcaaacacacaagctcagacaaaaacctgaattaaaatcccagctcagtggcattctctctagctagatgacccctggccgctgggagccctgctctcttcatctctcaaactaagatcctccctatcttgcagggttgttgttgacgatgctatgtaataatatctgcagaagtacttttaaaactgtaagcaacaaataatagctaccattatacttcctccactgccatactgtctcgctccgaaaacaaaccatagttgttcttcacatatacaattatagacctggaaataatgaggcgttcatctgcctgaatcatctagaattatagaaacagcaatctgctaccaccaactcaaactcactatcatgtcctctgcagctaattgtctttgacaatcaatttaaaagctaataaaaaggaaacatctggtgacaaaaaataaagtattaaaaatggaaagaaatacatcaaaaggacacagaatacaacttacaggggctcccattggcaatatatgcaacaatttgaataatgaatgatgacagtaatcggttataaaactttgaattaagaaacatgaatccgggccgggcgcggtggctcacgcctgtaatcccagcactttgggaggccgaggcgggtggatcatgaggtcaggagatcgagaccatcctggctaacaaggtgaaaccccgtctctactaaaaatacaaaaaattagccgggcgcggtggcgggcgcctgtagtcccagctactcgggaggctgaggcaggagaatggcgtgaacccgggaggcggagcttgcagtgagccgagattgcgccactgcagtccgcagtccggcctgggcgacagagcgagactccatctcaaaaaaaaaaaaaaaaaaaaaaaaaaaaagaaacatgaatccatactaattaaacattttttaatataaaagtgatggttagctggatgtgatggtgcatgcctgtactcccagctactcaggggtactaaggcagaaggatcacttgaacccaggagttcaaggctgcagtgagccactgatcactctgttctctagcctggatgacagagcaagaccctgccttaaaaaaaaaaaaaaaaaaaaagtcttgaagggtgataggaaaaggggggaagctttcctttttttttttttttttttttttgagaaggagtctcactctgtcacccgggctggagtgcagtgtcacgctcttggctcactgcaacctcggccttcagagttcaagcaattttcctgcctcagcctcctgaatagctgggactacaggcacatgccaccatgcccagctaatttttgtatttttagtagagatgggttttcaccatgttggccaggatggtctcgatctcttgacctcatgatctgcttgccttggcctcccaaagtgctgagattacaggcatgagccaccatgcccagccagggggaagtttttctttgtggaagaatgccaactaacaaataatagaatggtcagagcagagtagtgtgtgcctgtaatcccagcactttggaaggattgcttgatgccaggtgcacaagactagcctgggcaacatagtgagatttcatctctacaacagtaaataaataaataattagctgggcctagtggcgtacacctgtagtcccagctactcaggaggctgtaaggcaggaaggtcacttgagccaagaaatttgaggctgcagtgtgctatgatcatgcctgtgaatagctactgcacttcagcctgaacaacatagcaagaccccatctctaaaaaaaaaaaataatcagcatactgttagccagccagctcttgctggtattctttctgctatttttcacaagtaaattcactctgatccaaagtcttggggaaaaagtgaaatatacatctcagctgaaataaagcaaggtccctaggtctgtatcaactatttccatgtctagaggtggtcagtgaatctgccacataggtagcgagtcaccttctaagtcagaaattccagtatctcgttgggaaggttagcctttgtcttgtcgatccaatgcttttaattgtagccatatgatctcaaaagcaaatgtaacaaaaccaaaaatagactaatggcacttaattaaactaaagagcttttgtccagcaaaagaaacaatcagcagcataaacaggaaatctacagaatgggagaaaatatttgcaaattatgccttgacaaaggactaacatccagaatttataaggaacttaaaccaacaagaaaaaagtggtcaaagtacgtgaacagacacttttcaaaaggagacatatcagcaaccaacataagaaaaatgcccaacatcatggtaaacatgggtttactatgaagcaggcattgagcacagcatgtcactgagattccctccgttaatctttgtaataaccttttttctgctcagaagcgggaacagattgaaagaggttagtaatctgttgaaggtcacacagctcataactggcagagctgtgttttgtctacattagttcaaaccctttcgttttgaattgttctctacataatgccaaaatcaagtatgaaagtatcatattttataaaaatatacatttctaattatcagagaaatgcaaactaaaaccacaatgcgataccatttcacaccagtcagaatggctattattaaaaagtcaaaaaatagcagaagttggcatggatgtagagaaaaggaaatgcttacacgctgttggtgggaatgtagagtagttcaacccctacagaaaacagcatggaaatttctcagtgaactaaaaatagaattactatttgacccagcaattccatcactgggtatctacccaaagggaaaaagttattttatcaaacagacacttgcacttgtatgtttatctcagcactattcacaatagcaaagtcatggaatcaacctaagtgtctatcagtggtgcattagataaagaaaatgtggtatgtatataccatgcaatactacaaagccataaaaaagagtgaaatcatgtcctttgcaccaatgtggatacagctggaggccattatcctaggtgaaataactcagaaacagaaaattgaatactgcatgttctcacttacacgtgagagctaaacaatgggtatccaaggcaaggacatacagatggaaataatagacactggagaccccaaaagggaggagaggagaagagggggaaggattgataaactacctgttgggtagtatgttcgctgtttgggtgatgagatcactagaagcccgaaccccagcattatgaggtatacccatgcaagaaacctgcgtgtgtacccctgaatctataattaaaattttagccatatgaccacagtaagggtaaaaaaaccccatcacttgactttgagtgtgaacctgactgtattgatgagccgagatcatctgttccccttcattaatgtgaccagaaaatcaagatctaaagaatgaatgtcggtgcattgactgccatgcacctttttaaggtcaggtcctgataactgatccagtgcattaggcaacaaaagaaagctcacagtcactttgaaaatgtcatgtaggcaccagtttctaaggctccttttagccagtatatgtagaagcattttagtaactgtgctttatgagtttgaaaacttggagacatttttttcaattataagtcttcagactaagttactttaaaaaatgtctttcatttagcatttactaggaagcaggcaatgagcacagcgtgtcactgagattccctcctctaatctttgtaataaccttttttctgctcagaagtgggaacagattgaaagaggttagtaatttgttgaaggtcacacagctcataactggcagagctgtgttttgtctactttattacaaacccttttaaactgttctctacaataatgccaaaatcaagtatgaaggtatcatattttataaagattcttctgtttaccaaaacacatacacacacagcacttaaagctgtcaaatacatggacttcattttttagtagcttattaaagggaaactacaaatagttctttgagaaggtacaatattgttcctggatggaaagtgaaatttggatgatcacattaagtttggagaataaatacatgctattaataagaacagttcgaattctatttaaaattctattaacaatgtaaaaagctttttcttgtatttattccacctaagctccctggactcacagtttaccttaaactatcaagaaaagaagtataaaaatatttttgttgtattgcattcctatatatccagttttcccctagttatcaggtgtcagaaatagtgctatacagcctctaggtagagttctcttgtggatggcaaataggtattccagggatttgcccaaaggtgaatttcaatgagatctgcctacttctttcttaccttgagaagtatgagtatactcagggctgtgatggcatgtaaatgagttctgcttctatgctaattagatcaggcctctggagagtagccagctgttggtttttaaaagaaataaaactataggtcacagaaataagtcatttcaaagctggtttttagagaccttttctagcataagaaacagccatgcgtcccagaaggagcaatcaacatgtctgggtaaagaaagaggaggagagtgagcaggtaaataggatcattatttccaagcttttccctggaattcattacctgcacaaagtgtagtctccagaccttgagtgctgcctctatttttattttactataaattcatagtttatattgatatttagtaaaaaccaaataacggtaatacagtagtccctacttatcctcagaggatgtgttctaagacccccagtgggcgtgggaagcattggatactatggaactctacaaggtactatattttttcctattcatatctacctgtgacaatgtttaatctataaaataggtacagtaagaaactaacaacaataaaacagaatgcttataacagtatactataataaaagttatgtgaacgtggtctctcgctccaaaataacatattgaatgtaatattttcagaccttgctggactgtaactgaaactgtagaaagtgaaactgtagaaactgtagaaagggtaaggaagactactgtcataaactcggtcttccttggctcccagggaatttcactctcctcctcctccaatatctccagtactttcttctttgtcatcttctcttgcttcactttctctaccaaccaggattgattagatgttttccacatttggctttgactctattctcttttttaaagaaatctctcttgatcatcttacccacttctaaagcgtcaatcactaaggaaaataaaatcttataagaatgtgtttgtaatcaaagaaaagggaagagatgttaacattatccatctgatgagggcttcttaccccttttttagccatggacccctttgacagtcgatgaaacctatgcattattccctgaatcatgtttttaaattcatgatttaaaatacagaggattgcaaaggaaactgaaagtgttaaagtgagcagaatatttttagaaatacatttataataagctcatgtgtatcctgcagtacatattcacaaaatgacaagatccggtcactaccacactttcaaagtagtgagaaggacttggaaatgttgtctataaccataccacaggaggaaaatttttagtggagacaaaattgcaggtttcattaatgttcttatggtttgttgcctatgttcataactgaagggaaatttacattttagttagtgactagggaaaataaagatgtagaattcatgtgcatagatccccctgaattctacccatagatccaagtttaagaacacctggtctaaggatttccaaaaaagattgggaatcgtgacttacttgtatgcccaagagaagccatagggacagtacgaagaaggcgatgttatggagccatctgtaattgtacaattatactatattcctcccctcatatgtttggtttatctgggcttcctgtgtctcctcttgtctttctccatataccttttatatcatatcaaagcaaaattaaaactagctagttctttatttggtggcagctgttgtgttttggcattgttttgttggagggatgtttttgtttgtttattggattgtttttttaaatatatccatcggttgtaggggaggcagaaactactgagtatctgggattatttatccgcgctatgtctagcttctattaacatagataattgggctttaaatgtggatagaattaagatatccaacttcaacctctgtctattgccttcgaaggcctcgaggtacatcaaataatcccctttccatcttgtaactctctctccccttggcttcctgaacgctgcttctcctggacccctctcatcttcctgcttctctaaaggtctctcttctgaaccctgtcatctgtttcactcaaccgtcagtaggcatttccctcactttaggctttggactggttttctcatggtcttttcttctttgatactctcccaatccccaatttacattctttcccctgttctttgtcaggttttgttttgtttgtttgtttgtttttgagacagagtctcgctctgtcacccaggctggagtgcagtggtacaatctcggttcactgcaagctccacctcccagggttcatgccattctcctgcctcagcctcccgagtagctgggactacaggcgcccaccaccacgcctggctaattttttgtatttttagtagagacggggtttcaccgtgttagccaagatggtctcaatttcctgacctcatgatccgcccgcctcggcctcccaaagtgctgggattacaggtgtgagccaccgcacctggcccattgtcagtttgaatggatcccagctccccacctcccagctgagattttaacgacacccaatatgcattctttggacactcactgtgcacaattatactatagtatatagttacgttaggcactgggcatacaattccggaccaacaaaacatcctgccctcacacatcctataatccatcaaggaaggccttaatcaagtaatttcaggagtgaggtgtaggatgaaagaggaggagcaggtcactgcagaagttgatattaaggggatctagcctagtttgggggtataaggaagccaatcaggagaagtgaagttttgattggaactttaaaggttaactgggagatggctcaataaccagtgtaggaattgggattaggacaatgcatgtgaaatgcaaaagtcagaaagaatagtggggaaggaagtaaagatgacaannnnnnnnnnnnnnnnnnnnnnnnnnnnnnnnnnnnnnnnnnnnnnnnnnnnnnnnnnnnnnnnnnnnnnnnnnnnnnnnnnnnnnnnnnnnnnnnnnnnnnnnnnnnnnnnnnnnnnnnnnnnnnnnnnnnnnnnnnnnnnnnnnnnnnnnnnnnnnnnnnnnnnnnnnnnnnnnnnnnnnnnnnnnnnnnnnnnnnnnnnnnnnnnnnnnnnnnnnnnnnnnnnnnnnnnnnnnnnnnnnnnnnnnnnnnnnnnnnnnnnnnnnnnnnnnnnnnnnnnnnnnnnnnnnnnnnnnnnnnnnnnnnnnnnnnnnnnnnnnnnnnnnnnnnnnnnnnnnnnnnnnnnnnnnnnnnnnnnnnnnnnnnnnnnnnnnnnnnnnnnnnnnnnnnnnnnnnnnnnnnnnnnnnnnnnnnnnnnnnnnnnnnnnnnnnnnnnnnnnnnnnnnnnnnnnnnnnnnnnnnnnnnnnnnnnnnnnnnnnnnnnnnnnnnnnnnnnnnnnnnnnnnnnnnnnnnnnnnnnnnnnnnnnnnnnnnnnnnnnnnnnnnnnnnnnnnnnnnnnnnnnnnnnnnnnnnnnnnnnnnnnnnnnnnnnnnnnnnnnnnnnnnnnnnnnnnnnnnnnnnnnnnnnnnnnnnnnnnnnnnnnnnnnnnnnnnnnnnnnnnnnnnnnnnnnnnnnnnnnnnnnnnnnnnnnnnnnnnnnnnnnnnnnnnnnnnnnnnnnnnnnnnnnnnnnnnnnnnnnnnnnnnnnnnnnnnnnnnnnnnnnnnnnnnnnnnnnnnnnnnnnnnnnnnnnnnnnnnnnnnnnnnnnnnnnnnnnnnnnnnnnnnnnnnnnnnnnnnnnnnnnnnnnnnnnnnnnnnnnnnnnnnnnnnnnnnnnnnnnnnnnnnnnnnnnnnnnnnnnnnnnnnnnnnnnnnnnnnnnnnnnnnnnnnnnnnnnnnnnnnnnnnnnnnnnnnnnnnnnnnnnnnnnnnnnnnnnnnnnnnnnnnnnnnnnnnnnnnnnnnnnnnnnnnnnnnnnnnnnnnnnnnnnnnnnnnnnnnnnnnnnnnnnnnnnnnnnnnnnnnnnnnnnnnnnnnnnnnnnnnnnnnnnnnnnnnnnnnnnnnnnnnnnnnnnnnnnnnnnnnnnnnnnnnnnnnnnnnnnnnnnnnnnnnnnnnnnnnnnnnnnnnnnnnnnnnnnnnnnnnnnnnnnnnnnnnnnnnnnnnnnnnnnnnnnnnnnnnnnnnnnnnnnnnnnnnnnnnnnnnnnnnnnnnnnnnnnnnnnnnnnnnnnnnnnnnnnnnnnnnnnnnnnnnnnnnnnnnnnnnnnnnnnnnnnnnnnnnnnnnnnnnnnnnnnnnnnnnnnnnnnnnnnnnnnnnnnnnnnnnnnnnnnnnnnnnnnnnnnnnnnnnnnnnnnnnnnnnnnnnnnnnnnnnnnnnnnnnnnnnnnnnnnnnnnnnnnnnnnnnnnnnnnnnnnnnnnnnnnnnnnnnnnnnnnnnnnnnnnnnnnnnnnnnnnnnnnnnnnnnnnnnnnnnnnnnnnnnnnnnnnnnnnnnnnnnnnnnnnnnnnnnnnnnnnnnnnnnnnnnnnnnnnnnnnnnnnnnnnnnnnnnnnnnnnnnnnnnnnnnnnnnnnnnnnnnnnnnnnnnnnnnnnnnnnnnnnnnnnnnnnnnnnnnnnnnnnnnnnnnnnnnnnnnnnnnnnnnnnnnnnnnnnnnnnnnnnnnnnnnnnnnnnnnnnnnnnnnnnnnnnnnnnnnnnnnnnnnnnnnnnnnnnnnnnnnnnnnnnnnnnnnnnnnnnnnnnnnnnnnnnnnnnnnnnnnnnnnnnnnnnnnnnnnnnnnnnnnnnnnnnnnnnnnnnnnnnnnnnnnnnnnnnnnnnnnnnnnnnnnnnnnnnnnnnnnnnnnnnnnnnnnnnnnnnnnnnnnnnnnnnnnnnnnnnnnnnnnnnnnnnnnnnnnnnnnnnnnnnnnnnnnnnnnnnnnnnnnnnnnnnnnnnnnnnnnnnnnnnnnnnnnnnnnnnnnnnnnnnnnnnnnnnnnnnnnnnnnnnnnnnnnnnnnnnnnnnnnnnnnnnnnnnnnnnnnnnnnnnnnnnnnnnnnnnnnnnnnnnnnnnnnnnnnnnnnnnnnnnnnnnnnnnnnnnnnnnnnnnnnnnnnnnnnnnnnnnnnnnnnnnnnnnnnnnnnnnnnnnnnnnnnnnnnnnnnnnnnnnnnnnnnnnnnnnnnnnnnnnnnnnnnnnnnnnnnnnnnnnnnnnnnnnnnnnnnnnnnnnnnnnnnnnnnnnnnnnnnnnnnnnnnnnnnnnnnnnnnnnnnnnnnnnnnnnnnnnnnnnnnnnnnnnnnnnnnnnnnnnnnnnnnnnnnnnnnnnnnnnnnnnnnnnnnnnnnnnnnnnnnnnnnnnnnnnnnnnnnnnnnnnnnnnnnnnnnnnnnnnnnnnnnnnnnnnnnnnnnnnnnnnnnnnnnnnnnnnnnnnnnnnnnnnnnnnnnnnnnnnnnnnnnnnnnnnnnnnnnnnnnnnnnnnnnnnnnnnnnnnnnnnnnnnnnnnnnnnnnnnnnnnnnnnnnnnnnnnnnnnnnnnnnnnnnnnnnnnnnnnnnnnnnnnnnnnnnnnnnnnnnnnnnnnnnnnnnnnnnnnnnnnnnnnnnnnnnnnnnnnnnnnnnnnnnnnnnnnnnnnnnnnnnnnnnnnnnnnnnnnnnnnnnnnnnnnnnnnnnnnnnnnnnnnnnnnnnnnnnnnnnnnnnnnnnnnnnnnnnnnnnnnnnnnnnnnnnnaatgcattcagaatgagtaaagaatattttttagatgtctgctgtatgcatatataaagatctgtggcttcaaatttgactagattttgtttgtttgtttttcaaaatcttttctaagaattgccctggtggaaaatattcctgaaggccttaactattcagaaaatgcaccatttcacttatcacttttccaaggctggatgaatttactcaacatggccaaaaagtctgttgacatagtgtcttcccattgggatctcaaccacactcatccatcagcatgtcaggtaagctacatcctctgtgtgtgtgatgattttacttatgtgcattttccactccttagtattctgctcctccactcctcaaactcaagctcatttattttagtctacacacacccagagtacatgtacattattacatttatgtagatgtgtcgttgttaatcatatgtcactcagctcctactagaatgccaggtttgcaaggacaaaattatgtttcatctttgcctacagtcggctctttatacagaattgctgtgttgtacaacttcagggcgtgctatttacatgataatctctgtcaatggcatggtccagaattctgcttcgcccaactagcgtgtttacagttctaattctgtaactgctcgctgaggcatttatttggttaatttgtgttataattcacctttcaagttataattcacccacagccacatttttttaatagagtgaaatttcccaggatagttgtttttctcgactgtcgtatttggatgaatgggaaaaagaaatatgcttatctcttttcaaaaataaggctcggagaactacctttagaaaactgacttaatgatctaaacaatttctgaataaaatgctctgggtgtaagaaaatggtgctggtgattttagtgtttttctttatattggtacaaccatgatagtttacattaagctaccctatctaaatatatagccattggcctacacttaaatatcatatgtaagtcaagggcaaaataagttttgtctccttttatgcaaaatgtagtggtattaagcttataatcatgatctcattggtactttgaaagctattgaatctattcaattatactattttaaagtcaaaagttactggaaaataaaaacaaaaaacaaaaaacacgaaggccgtaactaaagaagaatggaatgagtttactaactgtgttctacacttttccatctctactaaagtttaagtaagtgtttcaggatttattattccataatgtctcctaaaatatagtggtttaaagaaatagtatctatttgttcatgattctgggcagggttgggcagagaggacttatctctgatccatatggtattggctggggtgggttgcctggggatggagaatcctggatggctttcctcacatatctggtatctcagctggggtgactggaacgtctgggatggctgagtctctctgcatgttctgtcatgattcagtaaatcatcttgagctctttacatggtggttggatcctcagaaggcaaagagctctggaatcctagcatgttgctcccaatctattccattggtagaagcacgtctcaagtccaggaagggaggagcaacatccaagtacaggaatgaggattattggtggccatctttggaaataacataccacagcccattctctggccatagcaattcatatctctcttttacatgcaaaacacattcaccttattcctcaaagtgggaattctactacatcaagggctctggaaggaagccagagatcacctccaataccccttttgctcttacgtgggctctttggctagatctagaaattgacaccaggcagattagcaggagaaaagtctacagattttattagttttactcgtacatgtggatcttcacaagagagcgaagtccaaagaagtggccaaagtaagatgtttttatactttttagacaaagaatgataaatttgaggagaaatgacaggacaaaggggatgtgtgtgggggcagtcaatttctaggggagtcactaggagatatagaaggggtataaaaccagtgggagataggatcacttcattaagtgtgtttattcaggtccatggcagcccccagtttcccgtctctggtgataagggctattttctcaccctggtacagggaggatgtgcttctcagaagaatctttatggtttgctgcccacaggaagagacaggtcagcgatcccttactgaactacaattttccccgtgttttccacttgaaataatcaccaatataccaacctgacatattttgagatggcacatccctcactccttcagctcaaaatccagagtctctttatttgcatcaggtctggatctgagtgaggattctcatgtgggcttctcttgatttggaaacatgcaagccaaaaatttgtcttttctttaggccagagccatttaaattcttcccttctacttatatttttattttattttattttatttttggagacagagactcgctgtgttgcccaggttggagtgtagtggtgcgacctcggctctctgcaacctccacctcctgggttcaagcaattctcctgtctcagcctcccgagtagctgggattacaggttcacaccaccatgctcagctaagttttcatatttttagtagagaggaggtttcaccatgctggccaggctggtctcgaattcctgacctcaagtgatccacccgccttggcctcccaaagtgttgggattataggtgtgagccactgtgcctggcccccttctacttattttgaaatggagaatagattattgtaaactgtagtttacttctatagttactatagaagtacttcaaaaacttgtaatctgcctgaagaatttcagccagcttcacaagttcattagttgtattttccatgttctattttatagcaggtggtactattgcaagcactctgccattgcataatacagatggccctttctcaaggcttcaaaggaaatttcctactcttcttccagccttgaatgataggagtagaggctagcctccaccatgacccaatcccacatggctttatttatttacttattaatttttttgagacagagttttgctctgttgccgaggctaaagtgtggtggtgtgatcttggctcactgcaacctctacttcccgggttcaagcgattctcctgccacagcctcctgagtagctgggattgcaggcacctgccaccacaccaagctaatttttgtatttttagtagggatggggtttcaccatgttagccaggctggtcttgaactgacctcaagtcatccacccaccacggtctcccatatgactttaggtagatgttattgatgtagaaaggtagatgctagatgttattgatgtagaaagatgataacacttagaagcttagttcaagtcactctctaacaactggcctgctgccaacaaatggaatttttcaacttactgcctatgacctaactatcgttgaactcacaggcaagcttttaggaagagacctagtttagaataatgtcttctggtagagtcatactgctcctgccgaagagacacctcttagctgcctctcatctccctaatagcaacagacttctgtacaatgtaaaaccagctggttttctgtagttttgagcctaattttgctttgcctctttacaagggggagatctgcctttgcaaacatgaaggatagaggggctttatctgctttgggaattaaatggattaaaggtgctgtgaggctgatcttgcagttctcgccatacctgtctgtccctggccatgtcctgtggggaagcaatgatgttcggagggttctcacttcaacaaggtagtggaatttctctcctcttcttctagtttttctagtttgttggtggccaagtgactgtttctgcagaatctcaagcctttggtctccactggccaaaagccaggcatggactatggtcttaaagagcaagcatgcagaatttagggtgttttgttgcctgagtggctccctctcaccttgccccgattcccctctctcaacccctagagcggtatgcacaacaggttagcattaaaaggtctgggggaacttatctgaagaccgcatttcttgggcacttaaagattaattttagagagttgggcgtggtggcctgtaataccagcactttgggaggccgaggcgggcagatcacctgagatcaggagtttgaaaccagcctggcaaacatggtgaaaccccgtctgtactaaaaatgcaaaattagctgggcgtggtggcacatgcctgtaatcccagctacccaggaggctgaaacagaacaattgctggaacccgggaggcggaggctgcagtgagctgagattgagccactgcactccagcctgggggacagagtgagactctgtgtatctattaaaaaaaaaaaaaaaaaaaaaaaaaaaggaaaaagaaaaagattatttttagagtctattcccctcctttccccctctcactgggcaggtaggggaataattgtgaagtgatgaagaatggagaaaggaaacaggtacttgctgccaactccttctttttgggtgcagttcaaggacccctatatcctgttctttgcagataaaaatcaccaagttttaccctaaaacttcactgcctataaaaaggcactaactgaaagctactttgatttaaatttttacctgattttatctttcaaatggaaaaggaaattcaagactatccaaacctttcaaactttgggcaggcagtctttggacttgtgtgtgcccttttatctttaccaagaccctataaatattggcagatagtctctcattggtttattgcgtgcaaaaatatgctaggaaaaaatagttcacaccctgattactcaagtgaacaaatttaaattttctttaaaatattctggtgccaaacactatccttcacagatacgtgtgataaaaaaatgtgtcaggttcacagcttctttttcattaatttttttaaagataatatttttttagttgggggacaatagtcaaatgtgacatttaattttaaaccaacagagccagaaaagtcctaaatggaaccttagatggcacatacataaagagcagcccataaccaaaaagcagcccagatgtcttttataatgtagcaataagaaaatataccaagaaaccacgtagccagtggtaggcagaacagctcagcagcagacgcacacattttattggtctggtctctggaagagtagcaattttgttagagtgagtgtgatggttgctactaacaggaatgatgaatatgtgcttttttattttgcacacattttattgatctggtctctggaagagtagcaattttgtaagagtgagtgtgatggttgttactaacaggaatgatgaatatgtgcttttttatttttcatttgcatggaaacagacatgttgatttaaaatgtgtttttaatctgtacctccaaaaggttgctgtttgggtttccaccctgaaaaacccactttgtttttcttgtctctttcctggtgttaatctgtttgtgtttgtttccttctgtgctaaaggaaactggacggtgcccttactccgtatcacagcctgctaagggctgctgaggtctagagtttcatgataactgtatgttagaattttatgaaaatacatggtcgggcaaaaggtttttgtttctgtctggatgatgagttgccaccctaaaatgttgaaattcctgggacatcttgattgctaatttatgagacaaaatgatgggaatttatgaaatcaagcctgttcagaaacagtcaggaaatataactgacagaggctcattagtagagctacctaattcactgggttaaaaaaaaaaatctcacactctatgaattcactgtgaggaacctataaaataattaatgagctgcaacaatggaatcttaaggagatgtatttatgtgaaatcaattagatactggtctaccagtgagctgtgattgccaactgatgatacatcagaattgtttgatttcgagaaattatgattttttaaaatcaaacagtatttatgaaatagcaagcataagagctcggtgatccaagaggttgtttttgggaagtacgagcctggatcctacctctacacagtggttagcagatcttagcaagactgcagaaatgagccaggagtggagctgaggtttttgttttgttttgttttttgacctacttattagctgtgcaacctcgggcaagaggatgaactctgtatgcctcagtttcctcaatagcaaaatcagggcgataacagaacctgcctcataggtggttgtgcagattaaatcagttaatacctgtgaagaggatagaacagtgtttgaccattttagtgcctatataagggtttgttatgatcgtgaatattgttattcacattcactgatttgtgtacacactgtacctctggttcaagtttattctgttagcaagttcttattatggctctcacactgtgctagaaattgggatggttactgtgtacaattagaaggggattagagtttctgcaaacgtgagactctgggtagataagaagtattaggcaaattatcattgtatgtggaattcttactttcatttgatttattaattataaatcttcaagtgtgtgtgcgcgcacacacccacagtcttactctcactcatctactcaagcagttattggttgacacacccgttgagaagcagctgctctatctttggagaagcagggggcacttcagctttggaaaacatctagaaggactgttcaccccctcaccatccaaagcagccccattctcaagaattctacaagcttaagaatacctttttttacctctccatttgtcctgaaatttatgaccaaacactatctagcaaagttatctggtaagattgtgaaatatttgatcttagaacactatcatttaatggaaaatataaccacagtctatatttgcacgtgtgtgtgtgtatatctccctctggacaaataacatcttgaattttgaaaacacagtaaattatgtggtcttcttgaacctacagtccctcctaatttttgttgattgacgttttgttctatattgaagacccatatgacctggcaacattcatgtgaccctgccattgtgattcaggcagctgtatccatgtgtgactcaggtctccaggcgctacctggtagcccactcattccttttctgcaatattcttcctaactgatgcgatcaatgcagtttgaccaacagacaagggcttttgtttcatcaaacttataaaacgtttccttgccatgtttgtttcatagccatccttacgattcatttgtaaatgatattattaacattttctattaaaaccactgcacgttttggcccataatgcctcttatctgtcctaaggaagcccgcagcctggtggagtcctctatggccccctgcctccagcatctcttgttcccaggctccgtcatcttttccattctccatcttccctggctctctaagcctacttgtcctttcttgcccatccctacaatcctaggcaagtctccattccctcaagtcttctgaaggagactctttattcatttatcatgcaaacagtcagcatctactttgtaacacagggctatgcctgaaacccagaagaatcctgtttttgacaacgtcactcccatgtaaaagtctgataaaactatctaatactcgtgtggcctgaacatggaatatttaattaaaatttcttaacaattttttttaacccaagaaaataacatcatagcatttcctagttttcattttgcctggaaaaagattggcatagttggtggagactagatcctttaaataattgaaattctttgagcctattgtaagtggcaggttgggtaaagcagtcagggaaagcaggatattctgatgcaacataaaaacacacatttcatttttgttttgttgtagatcctgagggcttatacatatttctactatattatgcaaacttcctaccgtctagtttgtctatttttaatgaggacatagggaaaaataaaacacgtataaattaatgaaagcataattaggatacatacaaattctctgttgttatttggctcaggtgagaattgtgtattttgtttatatttagttctcagcgcttggttttatagaaaaggcaaattcgcagtgttattccagatccatgtactacaggggaaagatcataggctttgtcatttatacatttgattgactaatagtttagtagttgtggtcacattgaacaaatgtcacaactcatctgatcttcagtgttcccatctattaattaaaattaattctgatttataaatttatacccctctataaaatgggtattttaataatcctatctcatttgattgcttggtgaattcaattagataatatttgtaaaacaataaagaatggagcttttaaaagatagctgtggttttcatttttgttgttttgatgcaggacatttactttcaaatttagtggacacgactctctatgtaatcttacaaaaagaataatattcagctgtctgtcaagatttcaacttatatgaaaagaagttaagatagaaaattctacacagaatacaattcaaattgctctctagggtttaggtgaagaaaggagatgccgggcgtggtggccaacgcctgtaatcccagcactttgggaggctgaggcgggtggatcacgaggtcagtaggtcaagaccatcctggccaacatggttaaaccccatttctactaaaatacaaaaaattagctgggtgtggtggcaggcgcctgtagtcccaggtacttaggaggctgaggcgggggaatcgcttgaacccgggaggcagaggttgcagtgagctgagattgtgccactgctctacagcctggtgacacagcaagactcggtctcgaaaaaaaaaaatgagagacagaaaaatacacatatttttcaggtagactcccacttttctctcccaatatggtggttttcaactgtggctgccagtcagagtcacctggggagattttaaaatacgcttatgcccaagcccatcctagactagttaggtcacaatatttggagaggggcccaggcttcaatacttctaaaaacgatgaggggattttactgggcacccaggattgagaatcactgttttaaaccatcccggtctaataaacattgttcaactttcataggttccaagatcgggccaggttggtccctaccccagtttgtcaacctaactttgtgtgtttcaaattaatcctgtgattgcaattgttccctcagtagtgatgtaaatgagtagcagcttgtacttggatattccacatagccctggactctaggacccacgtcgtatttatcctgctggtgttattgtccagcgtaccaccagtaacaaaatggagctcagtgattgctttttggtttgaaacagtagattaccttcagccttttcatctccaggctgcatatgatatcagtagaactcctggtacagtgtcagcataaagacagcataacctcacggaaagagtgcccctttatttcaaagtaacatctattccctgctccacagaatcaacactcagcaaatgcttatttgttaattagcatcctcccattttaaatgtggcaacaaaatgatgttaaatgtgcctttattgaacaaacatttatcaaggtgctgtgctatttgctggggatagaaaatcaaataagcaagggtcgctacctccatagagctcaaagtgtggtgagggagacagacaaacataaaaccatttataacgatacagcatagtagaacaacactgaggggtgctctcagcaaattggctcatgcaggattacctctgcttttgaactgtgcagcagagctcacacggtggattttggtcctgttttttcttggtatgttcctgctgctgcttcatgctgccatttccccatctgttgagtaatcctgattatgttcttgcttgctttccaacatatttctatgggaaatcattattctaatataaactcataagcattatcattagtaagagtttaacctctatgattccttttaaatccaatcatatggccatgaataaatcatgaacctaagatatgccttctaattgttcgtattaattactttctttaagattgtcttatctgagtttgcttgcttgtatgctggtttattttttctctgtatcttcatttgtgtttttcctatttttctatgaccattttttttggtactttcactcgaataggtcagattttttcctttgtcattagtaagaacctctcacgatcaaaaatttggaaactatggagaaatgagagagaaaccaaatcctccaaatggccgccaacaaaaaaagtttttgacagtttgatatttcatgcataatttgtatacataggctcatattatataaaaagaattatatgttttgtttgtttgtttgtttttgagacagggtctcactctgtcacccaggctggagtgcagtggcgtgatctcagctcactgcaacctccatctcccgggtgcaagcagttctcctgcttcagcctgccaagtagctgagagtacaggtgtgcaccaccacgcctggctaatttttgtattttcagtagagatgaggtttcaccgtgttggccaggctggtctcaaactcccggccttaagtgatccttccgcgtcggcctcccaaagtgctgggattacaggtgtgagccactgtgcccagcctaaagaattatatcttaattttgaacttaacattacaacgtaagcatctttccattttattagaaacactggtaaacatattttaattggctgcataacatacaatgtattagacttaccaggttaagttaatataactatttccctctattggacatttaagcatttatcttttccccctttttctgaatgagctgctgcagtaaatatctgtgcgttttttttcttactgtccatttgctcaagatcaattctcaaaatgtaaggatagggtatctgagctgccttgttaagaccatggaatatttagggagcatgtggcaagttctcatggcttttccctggggatgctggaatctcactgcagtgaggttttgaaggaattctctgtccgttctgcgtggggtcctcttcccacctggaataagtgattgtggaagcattggggatatttggcacattctggtgttcctttcttgccttggtctcccctctttcccctggagcaaaggaacgacaccaggctgtggatgctgtgctcttccagacactgctgaaaggcagtaccaagataatgttgtctgtcccctctgcagccagagtggacgctcgagcaatcccacaggtaattttcagctactgtaggattccagccgccgagagcctggttaccaacctcctgcttctgatattaatctcttgctatttcctggcccgtgattggcatgatgagcatattcatctctcttcatctgtccctgacagggatggctatgtttatgcccacggggtgcatcatcgagataaccatcattaagcaaggccttgatgatgaactgttcagattcattaaatcctctaatgagatggagcctgttatgatgaatggacaggcagcctgcatatctccacgccagatactctccactggtttcaagcagatattccttgtggctcattgccaaaaaatgagtactgtcaatcaaggtgctgggtctgtggcactgaactcctaaagctctgattgatccattgggacatctgtgaagagatgaagcggccgctatcttctgggtttgggataaggaattccatatttctcctggcacatccttagaactatttgcatattctggccaccactccaattcccctctctctcttaagctccaagcctaatcagcaggttcatcactgtgttatctcataaacaatacctggattctttccaatttataaatattcatatatattatatatatataatgtatatatacaaatgtatatatacaaatgtatacaatagtatatataatttatatataattttaaatattaatacatatttaaatattcatatatatatgaatatatgaaaaaggtcttgctttgttgcccaggctgggcagcagtggcacaatcataagctcaccttcagctttatcctcctgggttcaagcaatcctgcctcagcctctcaagtagctagaactataggtctgtgccaccatgcccagctgatgtttttaaatatttttagaaatgtgtctggttatattgctcaggctggtctccagctccaagcctcaagtgatcctcctgcctggcctgaccaagtggttgtgattacaggcatgagccagcacacccagctctttccagttttttttcattgcaattgatacttccctatttcaccaacctcattgctctttcagtctccagttctcccctgtaactatcattctccaatttgcagtccgagttcttttcttagaacaaaaacgtgattgtgtccttcactgggttaaatgcttcagagggtccacattgtcttccagatgagatccaaactcttcaatgcgtcttacaaggcccttcatcatgtgaccccatttatctctcctgtctcctgcctgctttctggattctgccataggctccacctggaacattctttcttccctacctttctttggggaactttccctgaggccttatgctggattattgatgccatgctatgcttttcccttgctctgtcttcctccatcctggaatttggaatattgggctgtatttgcttatctgtcatctacatattctccttgaatatcactagtactttcaggtcgctgacacataggaagcaaccagtaaataaatgctttgaatgaattggcctaaaagtcacttctctttatccaaggtcatttgagaataaaggctaacactgacaaatatacaaggaaataaccttcatacttatatctgtggcaaactttgtatatcctacaaactaaaaattcagtaagatataagtaagtaaataaatataagtaatataagtaaataaatatcaatcttatagcaaatttaactaattgattaaactaatgaattaagcccaaaggggattcatatctatatgaatatgaatatatattcatatatcatatgatctttcctcttaggtcataaattaaaaaaaaaatcaatgctagtatattgcttcaaaagaacactttgacttaaatcctaaatcttattttcttatgactatagcatcaaatgtttaatatgttcaatcagttatatttcctttttaattttcatttaaactttatatgcacgtatacacacacatatatatgtatgtgtaagtaggataatggtatatccaagataaactcttctgcaattgggcgcttatgtttctctgggatagatttctaggtgtaggattcctgggtggaagaaagccgatatgtcagagtatcatttccccaaatctccaaatctctgacgagaggaagtgttgagactcttaaatgtttttcagtctctttgagtacaaagaaaggtctctttattgtgctgctttgagcttccttgattacataaagcatctccctatgtctgttggccatagaggcttgcttttcttttttttttggagactgagtcttgctctgtcccccaggctggagtgcagtggcgcgatctcagctcactgcaacccccgcttcccgggttcacgccattctcctacctcagcctcctgagtagctgggactacaggcgcccgccaccacacctggctaattttttgtatttttagtagagatggggtttcaccgtgttagccaggatggtctcgatctcatgaccttgtgatccacccgcctcggcctcccaaaatgctgggattacaggcgtgagccaccactcctggccaaggcttgctcttcttaatcattgactgttctcatactttacctgcattttactgggttttgggacttttattatttttgtttgatagaaacagaccctcactatgttgtccaggctggtctcaaactcttggcctcaagtgatcctcccacatggccttccaaagcactgggattataggcgtaagcactgcacctagccaatttttaacacattttgtagagtacagctattatcccttcatctctcatttgtgtagcaaatatttattccagattttcttattaattttgtagtatcttttgcagtataatttatttaaatatgttataattctatatgtctgtattcttttattacttttatatagctggcttgtatattcatttcctgtggctactgtaacaaattgccatagactttttggtttaagaagcagaaatttattttcttacagacctggaggtaggaagcccgaaatcagtttccccggatcaaaaccaaggtgtcagagggtgatgctccctccagtggctccagagcctgccagcattcctcggctctcccagctcctggtggcttctggcattccttggcttgctgctgcaccttccagccttcaaggccagcatcttccaatctcttcctgctccatcttcacagtgtcttctcctctagttgtgtcaaatccccttttgcccatctcttataagtacacttgtgattgtatttaggattatcctcagataatccaggataatcccccatcataagatccttaatttaataatgtctgcaaagaccctatttccaaataaggtaacattgacaggctccagagattcagatgcactatctttggggagccattttttagcctgctaacagcctgattaaggttcccccattccaagacagtgcacatcattgcctggatttttttgaaagtattagtgtgtactaattctgactggaaacacatttttatttgtaatataatatagaggtcccttcatatgtgccggattaaacctttttaactgtttcgaactgaattaaaatagcgtctttttattgataaaaatattgtgcctctatttacaatagcaaagacttggaaccaacccaaatgcccatcaatgatagactggataaagaaaatatggcacatatacaccatggaatactatgcagccataaaaaagaatgagttcatgtcctttgcagggacatggatgaagctagaagccatcattctcagcaaactaacacaggaacagaaaacaaaacaccacatgttctcattcataagtgggattcaaacaatgagaacacatggacacagggaggggaacatcacatgccagggcctgttgggggatggggggcaaggggagggagagcattaggacaaatacctaatgcatgccggccttaaaacccagatgatgggttgacaggtgcagcaaaccaccatggcacatgtatacctatgtaacaaacctgcacgttctgcacatgtatcccagaacttaaaaattaaaaaagaaaaaaaaacaaacaaaaaatcttgtgcataccatttctggattatctattaagttcccttctatatttatacattcttatgcctctaccatgttaatatgatgaatatgattttatagtattttaaaaataatactgaaggtatttatggttataaatttctcttccacaccagatattgcctcctttcatggttttgctatgaggtacccacctattcatagctttctagagaaggcatacatttacttttcttctttggcataaggataatctaagagtgagttttaaatttccaaataggtaagatttgttttatactcacaaaacatgtaaatgatttgttgctaacttccttagattgtgagctgagaatgaagcctatagaatatctcattataacttttgttcaggcttcttaatggcagttacaagacagatttttgtaaatgttccacaaacgaaaattgttttaaggggatttgatatatagagtgagaagtatataaaagtatacatataatcaagtttattgataatatataatttttatatagtctcatttgttttctattagatctgcccaattttgagaaatatattttgaagtattacattgtgatagtgtattaattgcatttctattaatttttgctttatatatttagttgccatgctctttggtacatctcagtttacagctctcaaagcaccataaattgtgtcatttcataaaaatgacccactttttcccatctaataccttaaagcccacctccatttttcgtataacttttactgagattgtttatcctgttgattgtagatcagcatttctcaacctgttttttattattatcttcctgaggagccttctaatatatttttttcttaatactgcctcccatgatattataatatcacagatatactgcatatgtgttctatgtatatctgtgtgttagtcatcgaaagagtaacactatttcagtccctttggggcaatatcgctcccattgagaatgcgtgtaattgattctcagtagaccttcccctgtaatgtgtgacttccatttcaaaaacccacattgagtgcatgaaacacatgtacatatcgtattgttcctcacttatttcttctcccctcatcttctttgatggtgttcagtgttatttactgtttggttacagtttttctttaaatatgaatatgttccccatatgggttaagtaggcaagatagtctctaagtctgtttatatctgcaaatatttctttcaccctggcaggtaacattcttgagtgtgtaaaggattcttgggcctcagtctttgtcttccataggctatacaaccatgtacttgcagctggttagatctctgccagtctatctgattcattttccttgatgggtaactattgttttggtgagaggttgttctttctcctcgatgttaagtaattttacagaatatagctctaagtttttttcaaatttgccttcaccttcaggtaccttttcaccttgtagatttagttcttccctcaacttggatcatttttttttattttggtattatttgcaaacctaatcttttttgtatgcctatgagccacatgctgtatctcctctatttatatatcagccttttcccctgattccccttatttctctctctctctctctctctgtgtgtgtgtgtgttgtgtgtgtgtgtgtgtgtgtatacatgcacatgtgtactttgagatatttcttgcatttgatcttcaggccactaatccaggcttcaacaatggccatatggttctttaattaatcttctaagttagttctaaaatcatcgagtattagtaccagacacacttggccatccttcagtgcacatgttgtgttttagttctaacttccatcttctccaggagcctgtatcgcctgtatcaccaggtccccattgtgttaagcatcttccttcttgtaattggttctctttaaatgtgttgatatttaactttatcagattattagtggcttccatccttcaggtgaaggaaggtaaagactggagatatagcattgaatggtttactagttccccactggggcaaccaaaggaggcctctcccctcatatacccagccttgggtttagggaggtggccttggctcctgcaccaccttttgaagaacaggcaactctggaacactcatatagggctaagaattgttctgcaggcctctggactccccagaacctgagtctgctggtaattgagtgtccctcagccccagcactgcttggcttgggagagtctattagaccgtagctgggaatggaaagagtgggagagactggggagtaactttctttaagaataccccttccttttccgactttaacataacaaaatgatcattcagggagaactgtgttgcatcaggaagagagatgtatgttctaggcctgactgccactagcaagccatgtggtcatcagcatgtcactcagtttcttgtacctctgtgtcctcgtttgtaagatgaagagattggctgattattgatctaagtggtcttccagctacggccttctcagtttgtaggaaatctcagtatcctgaaggttctcattatgatgtggagtaaaattcagtggtttttccatctgtgttctgtggagccctgcggattctgtatgggaggaaaggaagggattggagaggtttcgcttacctttttatttgcactaagagttcaactgctaaaacaagcttgaaagccagcactagagtctacataagcctcagaattaagtttctctaacatgactttgggtttctgtttggtgtttttgcttatttccttcacattgtgtttgggcatttcatcctgtctcccagttgttttgggtcaacagaagtaagcagtatttatgacccaccagtcttttggaattgaaaggtaccagaagatgccacctcaaaatagacccctttggcatatggattattttgacctatggggaattgagaaccggcagtgcaggaagagtttttttttaacctttctctaattgcgtaaaaatgatggctccgtaccaggaagagagcgactcctggagacagctgtcatcacctgaaaggctcttacctgtataacaggacaaaccttacttaccatacttctcctcaccttcttataacttgccttccccacctggaagccccaaactcattttcctttgcttagccaaagatagtatataaaccttaatcatccggcaacctccttgagtcttgtttctttgctggattcccttgtatgcatgtaattaaaactttgtgtgtacataattaaaatgttgttggttctctcttgatagtttttcatcagtttgattcctgggcccagccattgaacctaggagggtagagaaacaggtttatttcctcccctacaggattgaagggtctcctacattaagcatcctcttcaaagtcacaaaggggctgagctggatctctattttgggggtacagcttcctgcatacgactctactgtacatcatgaggtttttacagacttcatttacaaattggtctaaagtaggtcagcgttcctgagacactgatagtctttgagataatttatctaagtctgaaatgttggctaatgttctttactagaaagggcaagattttatattggtgatgtttaaaagccaaggggcttttgttatttcttattaaaaaaatgatgagtgaggtcgggcacagtggctcatgcctataatcccagaactttgggaggccgagggaggtggatcacctcaagttaggagttcaagaccagcctggccaacatggtgaaaccctatctctactaaaaatacaaaaattagtcgatcatggtggcaggtgcctgtagtgccagctacatgggaagctgaggcaggagaatcacttgaacccaggaggcagaggttgcagtgagccgagatcacatcactgcaccccagtctgggcgacagatcgagactccatctcaaaagttaaaattaaaaaaaatgagtgaatgtaactcagaaagcattaggaggccttactgcagatctctgcacagagtagggtttaatacctttggaaatgattacattttgaatgtcttaacaaaaattatcatatggggagataacacactgaagacgatttaatagaaattctacctcaagcctaagtatggaaactctacccaagcccaagatcgttacagtgagcactataattaaaaattgtgggattccttggtgtaagtaatcagcacatactaaaagtaaaaataagctttatttaatgacagtctgccagtatctgtagattttggaatttctattttcattcatgtgtgagagttctggttgtctttaagtcccacaaaaataacacagtggaaatcaatttaagtcacagagccagaaatacagataagttagatggtctcttgaatgtttcatcggtgccaaatatattctgttaactaaaaaaataaatgaatttgccaaaaaatactggcccactgaccatggggccttacggaacacacgaagtgtttgtttgtgtgaaagggaaaaatacaaacaacttacgtgaacgtgagatgaccacgagtttaggttcgggaaatctgggccatgcacacatcaccaaaccttcaatggagtaagagtagaatggactccttggaggagtgccaaagctgaaaaggaggtattattggtgtcaattctgtctgtggaagaaccataaagccccttgacgtggattctccctcacatcctgtacctgagcctctcaccatccaagctcctacctctacacagtaaatttaaaatttacaaaggcactaaaatctgcaaatcagcacatttttttctttcctgtccttctctgtctctctggttgcctctgtctctttctctcaccctccctctcccctcctgcctctttttttttttttttaatttttggagatggggtctagctgtgttgcccaggctggtgtgcagtggcacaatcatggctcactgcatccttagactcccaggctcaagcacaacctcatcctcctgagtagcagggactacaggcgtgcaccatcatgcctggcttttttttttttttttaactttttgtagagacagggtctcctgatattgcccaggctggtctcgaactcctggggtcaagtgattcttccaccttggcctcccaaagcactgggattacaaggataagctcggcctctgcctcttttttaaataaggagttaataactgtctgatgcactcaacataccataccagaatacctggtttgtggtgaggcttcctccaggcttttggagtacagagaaatttaatcactttcaatgagctccactttgagcaacttttatttctacgcttgtttaaactaaaaggaagcctccatgcatggcacaggtgcaatggtgcaacttccactctgttgtccaacacccagggattatggagcaatggctatgccagccagctccaggctagagcacagctggatgtgccagatactcctgctgctgtcagctgtgacctcagcactggcagcttctttctcctaacaccctaaagcttcagggtcttgatcttcagtttctccctttccctttccctttccttttccttttccctttccatttcctttcctttctctcttttctctctcttttttttttgtttttttatttatttattttttgatggagtctcactctgtcgcccaggctggagttcagtggcgtgatctcagctcactgtaacctccacctcccaggttccagtgattctcctgcctcagcctccagggtagctgggattacaggcacccaccaccatgcccagctgatttttgtatttttagtagagactgggtttccccatgttgaccaggctggtttcaaactcctgacctcaggtgttgtgcccgcctcagtcccccaaagtgctgggattacaggtgtgaggctacgcacccggccagcttctctcttttctaaggctgaattgcaggaatcacctctctgcctccacatttctaccattctctcttcccaagtcaccaaacccattccatatcattatccacagtccattcttaccagagcaagataagaccttgccactgtggggccattaagaccaaagccttattctctgtttagctcctgaaggcatttgagtttgtgaaccaacagcaaaaaatctaaaaaatcaatacaagaagaccattttccttttatgataaggagacagacgggagtctattaaaacatacaaaggatgataaataggataatggtgcaatctgatgacctgagataatgcaatgactgtggacctactgttattcagtctgcctgagattaaaacttactctaaaaattatatgcttttgaaactcccatagataaaacttttatttatttgtttgttgagatggattcttgttctgtcgcccaggctggagtgctctggtgcaaccttggttcactgtaacctctgcctcccaggttcaagcaattctcctgcctcagcctcctgagtagctgggaataaaagtgcgcaccaccatgcccagctaatttttctatttttagtagaaacagagtttcaccaggttggccaggctggactggtctcagactcttggcctcaagtgatccacctgcctcagcctcccaaagttctgggattagaggcatgaaccaccatgcctggctgaaaaacttttatttttgattttgttttttatttcacttatttttaggcagaacattagttgaattcattaaaatacatttaaacaacatgaattcaggtaaatcactgattagtaaccataatttccctcttaacagctaattcttaaagaatgcttactattaacttctttaatctcacaaaaaccttttgaagtaaatataaatattatctgcattttgcagaggaagaaactggagattagtgagattaagaaacagcttttaaattggaaaaccagctggaatccaggtctctttgggccaaaacacaactgcttaatcttctttgctgcctcttcatgtgtagataacagattcaaaaagcagaaaagggtagatttgcattgtagcattggaattcttattgcaataattgttcaattgcacaataccccccaaaaagtgcaatctgtgttcatgctactactctattgatataaactcttttgaaagaatttcataaatctgaataccagttgttgaaatgcttgactttttaacatttgaacgaatagattaattttaatgagtttatttttacctgtctaaattggtaaacatttaggttttctgactttctttgtctctgaatattttttccagggtcaacgtctttttgaaaagttgctccagctgacttcgcaaaatattgaaatcaagctagtgagtgatgtaacagctgattcaaaggtattagaagccttgaaattaaagggtaagaccaaggttgatatgctattctaccgctgggtgttctgttaagatacctttaatttcacttaaaataatatataatttctttatggttagtacatttcacttagtacatagtacatttacatctttgaaaaataactcgattaaagtttttgagtggaggaactaattaatatattgggatttaaaaaaacagttgcatattagtgtaagcaaaataatctactggtcaataaatgatgattaactggaaagaagaatcttaccctttctgaacacttcaacggtgtgattacagagaagaaccacttcgcgtcagaatagacactggatctctacttttcacttgcctgccaaatgaaaatccttttcacgctatatatttaaaaaataatatagtcaggtcctggagtctatgaaacattgcctgattcatgagtttaaagacaattccacaggagaacaccatttatatagccactttgcagtttttctcacaatctcatgaagactgaagataattccaaaataacttttttttattttgctataatgtcaaccgaattgagctctcacatccaaatagtttttactgttttgtaaaaattgttccctggaatttattatccaaactgtaagcctctaaaaggaaaaggcgtgtttgagccagtgaaaatgttcaagctgccggacgtccctagaagaggacagggcactgacctcagtgagtcattcatgttccacctgatggcgttacagctcatgtttgtgctgtttaaacatactgtgccttttttgcttgtcgtcttccccacatttttaagtggcaattccttctaagaatggaacagaacaggaatcaaataagtgagccccagcggcccttcctcctgaagaagaaaaattggaagtgataaagcatattgaaagtcattaccacatagaagacgtaagcttggccatgcacatgtacctaccaccatgcacatgttttctatgcacaggaaaataaaacatgagataatcgtatgtttgaaaagctgtgctgtgctacttgggtgcagcagaatgtctttgaaaaacttgtaagtgcccagttcagtggattgacagatacaatcaacgtggcttagaaatgtattcttacttttcctattttttaaaaatgtaaaattgggttctcactatctgataatttgttagagaacactttttttttttctgaggaattgattacttttggttaaccgagggtcctgtatttgcagatgattttccttatggagtttcctagcatctctttgggtttgattatcctggcaggataaaaagctgatgtgttaggaagagaaggagggagcccgagacatccacagctctctttcttgccatagcccatgctaaagcttgtaaactcaaccaaaagttaaagcttggggatattaggaagcctaacagattttctttggagttgctgaatatttgctactgtaaacagcaaatagtgattgacaaatgcacgaataaaggcctggtttacatttctattgtgaactatatgttaaaatttcattatagtaattgcatctcacagaaaaagaagtgtttgaatttccaagcatatgtagatactactacaacttagattctgttgaaatataataagacttcttatcaaaacacgaaaacaaatgattttccttcataggagtaaagcaatgaacaggaccctaatttctcatagctattttctaggtagtgatggtaggcctctctggctcttagggatgcacatgatgtgtatactgtatgtagaacatgtataagtctttagaatacagttattgtatttctctactctcatcctttggtagacatatattaaatgataacagtgcattttagaaataatttttatgagactattttaaatctgtgattgaatatcttgcttaagggttatctttttgcaggggagggattctagtcttttagcaaaattctagaaagttttttccagaaatatcccaccaaaaaaataggtaaatataaaataagccatgagcaatttcagctgcaagagttactgaatatagaaactaatcaaatatattgtgaaaaagaataaaagtagggcttcccagtaaatgacaaagatttagtgcaggtgtaaggaggcccagaaaaaggccaggcaggctggagaagtgagacagctgaccaaggcccttctgacgggtggtgtgcaggtcattcctgttccttttgctccccatgctttgcctctctctttgactcagaagtcggaaagataaaccatctctccaaggtctcaaactgtggcttggaggtgaggtgcttttgaaacctagccctcatgaagtccttgcacccagggagggatttaattttacacaagggtccctgtaaattcaaaatgggttttattaatcagttttcttaatttcacttcctaaccatctccacctgtatccctcatataaacatctcaaatgcaacatgttgactcagctcacatgctttctttccctccctgcaccaacacagcatctgtccctatacctgaatttccatgtgctcagtcactcatgttagaaactcaactccacgctctcgtacgccacatctaatgagccatggtctatagactctatccccccgtctttcttctagataccacatttcctcctcacatacctgccttatttcaggtctcttaatactttgcttaagcctttgtcacctttcctctttcaccatctgatcttccacacagctaccaaagagatcttccaccacatggttattatcaccttacgtgttcccccaaattgcatgcaggtgtgaggatgcctgaggaatatcatgcatgcaataaaaggcacaagtattaaatatatagctcaatgaatttcacaaagtaaacacatccacataaaaccgtcacgggtcaagatgtagaacgttgcagacatctcagaaagccttctcagtccctcttgcagtcagtgccctccgcagagggaaccactatttcgacctctaccatagattacctttatctttctttgagctttatataaatagaatcacagaattctatatctggattctttggctgagttttatgtttataagaccaatacatgttggatacagcagtggtttattttacattgttgtatagtattccattttatgaatataatacagtggatctgttctactgatagatgtttgggtttttcctagtttgggttattacatataatgctgctatgagcattcttgtacatgtctttcagatgcctacacatatacatttctgttcagtatgaacttaggattgggattgctgacataataggctatatatgtgttcgatttcgatagatacggccagtcagttttctaagtggttgtactaattcacactctcacaaacactatgttaatgttctgtttgctccacatccttgcaaaatttggcaccttgttttattttagccattccggtggatacgtatcatgttgtatctttaatattcatttctctgatggcaaattatattgagcatcttctcatatgcttattgaccatttccatattctcttggagaaggtgcctctgcaagtattttgcccagtgttattgttgttttaattggcccattcctattgattattaggctagatttgaatcctttgttggatatatgtatttcatatatcttcatccatttgaggcttatcttttcactcttccaaggatgtgtttacataaatggaaattcttagttttaatgaaatctgatttattaattactcccttattgttgatgcttactgcatcctgtatacaaactatttatcatcacaaggtcatggagattttcttgtttgttgtgttctagatactatattattttgctgttcagatttaagtctgtgttaagtttggactttatttctgcttatggtatgaagtagcagtaaaggttcatttttatacttacggagggtcgttcgtttaaaaaagtttcttcactgcatgttcgaggcatcattgttaaaaattaggtgactgtattttagttctgtctttgaattctttaccgtattttctcagtctacttgtttatcccaggaccaatgccatactgtttaccttgcctttataatatgtgttacagatggtggaactttcatctttgtttttcacttttagaactgccttagttattcttggaccttcaggttttgaaacaaattttagaaccgtcttatcataaaactactgaaattgtattagaattacactgactctgtagataaacttggtgaaaattgacatggacaatattgaatcttttacttcatgcctatagcaaagctacaatatttcctcttactactgctttagctgcatctatttttaatatgacataaatttctaaattagttttctgtccagaaagttttctgatttctactgcagtctactctgtactgtggcctatttagaaatgtaatccttaattttcaaacgtttggagattgttctatttatcctttgttattttcattatgtatgttcatagaatatacttggtatgatttcagtcatttggtatttttagaaagttactttacaaaaatttatttaaataaatttgttttataaatatcaaggctttccattgctttcatacagcttttcatttttgtttttgcattttgtcaacccttataagtctaaaagctgaaagtggagtgtaagtgaaatagcttctcattgtctgatacatgatcttaatcggtagacttcacaaacaagctaaatgagatgtgagattgtcattgaaatcctctgctttcttcaaatccgtattcctgagggatgtgccacttgctgccaccacttggcttacagggagtaatcgtgacaattctttttttttttttttgagacggagtctcactctgtcacccaggctggagtgcaatggtgccatctcggctcactgcaagctctgcctcccggattcaagtgattcttctgcctcagcctcccaagtagctgggattataggtgcatgacaccagccctggctaatttttgtatttttagtagagatggagtttcaccatattgaccaggctggtctcgaactcctgacctcatgatctgcccactttggcttcccaaagtgttgggagtacaggcgtgagccaccccacctggccaacaattctcttaagtcccgttttctctgctcatgcctcccagcaaatgcctttgatatcctacttctcaccaaatctagtaatagcccagtcatattattgaatttttatattactaacacaatttttatctctggttgtatattctagtcctaagcaaaatatccctcaaggataccactgtacttttaattcttgtatgttatagttactgttgcaattaaattgaaaattaagaattatttgtccaccaaaaccataacaattcattgtactttctataatatgactacaatatttaatgcctctgtagcctagcaacaattaaaaataaaataaagtcagaaaatatcaatttccttttgaaaaaaaaaagcaggcttttatttgttcatggttggatgataaaatgatgagtgaaataagtgtcatagaagatttagaatcagtgacctagaagttaagttcacattttctttaaaaaataaaataaaataataataaggcatttgaaaccatttaggatctgaaatatctcgtttcagtctcattcttattatttactataattgagttttgaagtatctgaaagctaattgtgatttcccaaatacaacctactttttcagggctgtgtttctcaaaatattgttttccctgtgcctgaaatacccttatgtgtttcccttgtcaatttacaagctctttttcatcctttttaaaattaatttattttttttgagagagagagagagagaggggtgatgtcttgctccatcacccaggctgtagtacattggcactataatagctcactgcagctttgaactcctgggatcaagtggtgctcccacctcagcctccccagtagctgggactagaggcatgtgccaccatgcctgaccaagtccatttttaagccttacacatagtattttccctttcaccttcatctctttaccctggttgatcttaccatctactttttctccattgttcattaatatttaatccaacaattgcttcttgactatctgtcatgtgccaacaacttgggctttaaagagaggaagatgactaagacatgagccttcccctaacttcaaagagttcagagtttggtagagaaaaccaagcaataagtgaaatcaagtgatcaagaaattcctaaaacatctacacagagtccaatgtttctgaatcactttttgcaacagtggttgatgcccatgctttccacccagcattgtctctgtaccaccaagagtgtcgacggtgctatgtagctttaagaaacagaatgcattactgttgtctctaatcagaagcttgtttttgaagcttaccagaatatgtcaaagcaagatattcagacaataaccagatcttgtattctttcctcaaagggtccttaaatggtttgttgactgaatattgggaaactttaagagctctgtcatgccaccaggaataatgcagtgacaactttgtcacaacttgtcacttggtctgtagcaatcgtaagatgcattgcaatgtcagagatgttaaaatgtgaagactaaatgtttcagaatcaatgacttagagtaataagtgttattttaaaatatttagtaataaactagaaagttcaacttagaaactttaaactttaataagttaattaagttaaaatgaccattcctcataccacactgagagaggtagattctaaactaaacctcttgcaacagggcttctttgtagtgcagtgaccatactcagtggatggacattcggagaattcaggctgtgctggtttttaagaaatgtgggggtctttacagacccccttgatggctagagcattcagtgataggaagtgtgcctatccaaaaaatataagcaaaaactgctctattacctgaaacaggaaggaagttattcaaattggtttttatatgcaatttctataggaaaacaatacaatgaaaccagaaacctgaaatacactggagaagagacagtctcctgggatagacaagaaagatatcagaaatcatattcctagctatgcagcgtgatgaatcgcaacccaagtgaaaaaagaggggctaatcatgagagcttggttctaaaaagaagagggatagcaaacacgcagtggtaaacgtgacaggcatgaaaaggcccaggcgtttgttcccactgacattatctgctaagagagagtgaccgtacaaacaaccagtttcacttatgggctaaactctgtcactaggtgctgtttggtctttaaaaaaaaaataaatcttttaaattgattttatctgaaaagtaagtcacatatatttatcatgtgcaacatgttttgaaatctgtatacattgtgggatgggtacattgagctaattaacaaatgcattatttcatatacttattttttgtggtgagagcacttgaaatctacttccttagcaattttcaagaatataatcttgtacgttgttattaactgttatcaccatgttgtacggtagatcgctccttattgccagtgatcagcccaattacacaaccacagaaagaaattcatcctagagcttggggacctccaggctgtgcctctttctcctgatggtccagcacactgtgggcttggggtgttaacacagtcctgctcagctggtgttgcaagctttcagtctgttggaatcaaacatgtattttcttccccctcccttctctcctgcacacagacctataagtgattaaacatagagcttagtctgtgccacctatatatgttttgtgataactttaaggagctgataacaaaacttttttttacaaggttttgttttgttttgccagagcattcatgtgtcaagaattttctttcctttttgggattcttcatatagatagtagatacatagatagaaggtaggtagataggtaggtagatagttagatgacagatagaaagatatagataaatgatagatagatagatagatagatagatagatagatagatagatagatagaaggtaggtaggtagatatagatagatgatagatagatagatgatagaaagaaggtaggtaggtaggtagatagatatagatagaagacagtaggtagagatagattagatagatagatagatagatagatgaaaaaagaaagagaaagaagagggagagaaaagaaagaagataggaagatagatggcagatacacagaaagaaagaaatagatgacagatacatagaaagatagatattaatagatagatagatagatagatagatagatagatagatagatagatgatagtcttagttcatttgtgctgctgtaataactgagactgggcaatttataaagaacagccacttattttttcacagttctggggtctggaagtttaagatcaaggcaccagcaggttcagtgtctgctgagagctgctctgtgcttccaagatggcgccttgttactgcatcccccagagggaacaaacgctgtgtcctcacgtggcggataagacagaagggcacaaaagaatctaagtttgttcctttcaacccccgctacaagacaccaatacattcgtgactcagtcactttccaaagaccccaccacttaatactgccacagtgggaattacgtttaaacgaatgattcttgagggacattcaaatcagatagagaaatagatcttcagatttttctccccatgagattttaaaattaaatttctagatttccctatctttttatccatattgtttcctttctgttactttttgtttataaaggcaatacaaagcatgctcttggggtgaactcttggtcacagtgacagtgctcagccctctgcatccactcatctgctccccttgtgactcaagtcatacatttgctgagtgactgtctcagacacccagtttaaaagtgaccccaactttccctcattagcactatatagcaagtaagtgagccaattagacagagccttacccatattagtgaataaccaatagccacagggacctaataagccctggctgggcatctttaggtcatttgggttacgatcccacaaagcattgaacaattggtagacgtttaattggcctttactcgtgactaaattttattcattaaagtcaaaatcttaattgaaataagactaaatctctgtcactcttgttaataacactgtatttttaaatcgttgagttctggtgttcttttagctacattattttaaaaaggacagggagctgctgaattctttctgttgaattctaaatgtgatctttgccattgcttatttaaatttaagaaagctgtactcattcatcattgataatccatatttttattttcacattcatggattaggcttaacaaaatctttgaaagggaaaatatattcctaaatctgagcatagaagcatgtgtaattttttttattatactttaagttttagggtacatgtgcacaacgtgcaggttatttacatatgtatacacgtgccatgttggtgtgctgcacccattaactcgtcatttagagcatgcgtaattttttaagttaatgcaagctgccctagtttccaactctgcattttacaaggtgatttttgaacagcttactccaaatcagtggaggatagcttattgaggctttttttacttaggttttactgctttataattattccaaaatctaactctacaagtatgtatgcctgtgtgtgctaatttaatgtaagccttataagtataatttggtagtttccctagagtaaactttatattattctacctttcatttccactgtctgaaaggttgccatcgttaaggaggctgaacatttcaagtgaaggacagtcctcatggttatcatgaatgtggaatcctctggacaggggacttatgaagctgctttgtattgggtctgctctggtaatggcccagatggaagtcagggtgccccaacggtcacccaggcatgcttttccaatatgtgctttcatttcacaccttctcaaagcgaatgccacttgagaggctcatgcttgattgcctgaaggctgctgcctttgtcctatacgctgccgtcaaagtgtattgcaagggattctgtcttccacctttcttcatagcacaccaaaatatttggcagcaaggcagaaacttttcatcctatgctcgtttggccacattatgctttttagtgataattagcagcgtaattagcataataactaggaacaggtacttttgtggccccgaccttgtgctgaaattctaaacttgtcattactgtgtggtgtaaccataggccggcactttctctgagcctcagtggtggtggtggtggtggtggttgtttgagacgaatttcactcttgttgcccaggctggagggcaatggtgtgatattggctcactgcaacctccacctcccagtttcaagcgattcttctgcctcagcctcctgagtagctgggattacaggtgcccaccaccatgcctggctaatttttgtatttttggtagagatggggtttcgccatgttggccaggctggtgttgaactcctgatctcaggtgatccgcctgcctcagcctcccaaagtgctgggattacaggcgtgagccaccacgcccagcctttcctttttttcctttctttctttttttttttttttttcagttaaatgaggataataataacctccctgagagctatgagaattaaattagataatatataaaaagtgtctggtgcaggtgcctacctcataacgaactgttagtaaatgacatccactatagctgttgccttaatttacccaagtgtgtactatttgtgtttgacctgtcagtgccactagaccagactggatttatttttgcttctaaattacaaacctagatctgtgattttctgatgaaagaaaagccccggttttaatcatacattacagatcgtctttgggaatgcagctggtttgtttgcctgtatggttgtgcactaactcttgctggcttcagtttgtattggaattgttcagctggtgacaccagtgactccccatctgtgttttcggtctctgttctaagagctgcccaagttaagtctgcaattcaatgtgtttaaactttcacaagggttcatctgatacatataatatagtcgtacccatctaaacacataaaatctaaacatttgctctaaaacatagaatcttgtgctacaggttttatttttatccctaatacataagaacctcagcaggaataacattttcaaggaaattatatgcatattcaaccttgtgacaggagaaaagcagaattttatctgtttcatctggttgtggctttatgtatttctattctagggatgctagaatttggggaggatgttctttaagaggtgaagcggccgggcgcggtggctcacgcctgtaatcccagcactttgggagaccgaggcgggcagatcacgaggtcaggagatcgagaccatcctggctaacacagtgaaaccccgtctctactaaaaatacaaaaaattagccgggcgtggtggcaggcacctgtagtctcagctacttgggaggctgaggcaggagaatggcgtgaaccccagggggcagagcttgcagtgagccaagatcgcgccactgcactccagcctgggcgacagagcgagactccgtcttaaaaaaaaaaaaaaaaaaaaaaaaagtgaagagaggctgggtgtggtgattcacacttgtaatgccagcactttgggaggctgaggtgggaggatcatttgagctcaggagttccaccctgcagtgagctgtgatcggtgagctatgatccaccactgtactccagccaggcgatagagtgagaccctgcctcaaaaaaaaaaaaaaaaaaaaaagggccatacacggtggctcacgcctgtaatcccagcactttgggaggccaaggcaagcggatcatgaggtcaggagtttgagaccagcctgagcaacatggtaaaaccgtgtctctactaaaaatacaaaaattagccgggcttggtggtgtgcacctgtaatcccagctactcgggaggctgaggcaggagaactgtttgaactcaggaggcggaagttgcagtgagctgagatcacaccactgcactccagcctgagtgacagagtgagagtccatctcaaaaaaaaaaaaaaaaaaggcactgaagaggaataaagatataaataaatgaataaatggcagtctttcagaaagtccttataattccgagagatcccacggtcagcatttttagccagtagcttttctatttttttcagtcccaaacagaaaagctagttgctaaaaatactgatcatgggatccccagaatcagccctcgtctccacatctatgttcacacatccacgtgtatgttctgaagggtactagagactttttttttctttgttgtagagatagtcttgttatgttgcccaggctggtctcgaactcctgggctcaagccatcctcccaccttggcctccccaagtgctgggattacaggtgtgggccaccatgactggctagagacatattgtcttctgacagagcagttcctgccttgcctggagtagccagacagagaatattcattatcctcatgagtgagtaagatcccttacttctgtgactccgtggacatcccaattgcacctgctttttaaatcaatgtcacgagaactggtgtgagttaagatgccaagctctatttctgttcttcctagcaggctgttcagcatgaaccttggccatggcctattatttctgtgcccaccttcttcccatactatattttatctatttttttagctcatttccttccatccctttctcatgcttggtaattcaactaacttcctcctacgtcatacacaggaaaaggtattccaaatactcacagctatactcacactctatgtctcctaaccaacatctttcctctccataagatcatgtctcttacttactgaacataacaaacaaacaaaactagaggctatcagcctgggactctcccatcacagtgctctatcccagtacattttccatatctacatgcatctccatctcctttccttcaacctcaggaggttatctctgattctcttccaaggctaactcttccacctgagacatctggtcccactttttcaggaatttcagtcaagtttttttctctcttacctttacatttaccctttgccttttaaatggctctctccccttaatgtataaacacactcaagtcaatgaggggaaaggaaaaagaacttggcactatccatcctagatcccctctggcaggtgttccccacccaatgcctgcccttttctccatgttcaggtttatgcaccactggtcctacccctgtgcagtcctccaactgcggcagcccggctctgccctgactccactgaaactaccttgtcaaagtcccggaggacttccaggtatggaactcggtgggaatatcttagaccttgtatcacatgacctttcttcagctttgaacactatgtactgcttttttcttttccttggaactgtctagtcccttggtttcactctgtatttcccttctgtctctggccacgctttctcagtctcttttgccaattttgaatacactatcattcccttaaacattggcttcttctcttctttctcttcctcttcccttctcttcactttatttactcttgctgcattgattgcttctgcttctgtggcttcattcatcaccgatatgcagatggcccacacattgtttttcctaagttccaggcacaaatattcaactgcaaacttcacatttcctcttggatattcacggaatacctcaaaatcaatgtatccaaaatgaaatggatgcaccacccccacctggccctccatgttcttcttccattaagttttatctcagtaaatgacctgactatttttttatttgccccgcaaagaaacctagagctaaccttgatttccttctcctcctccaaccttcaaaatcaaatcagtctgcacttctacatgtgcagtcttaacatttctggaaatagttctccttttccctccctccctctactactctaacttaggcctttatcatttctctggaatgactgcaaatgacatcctaacagtttttcctgactccaatgttaactatgttctattctccacactgaatgaggctcctaaaagtcagtaaattcttcctgtcccttccttgctttaccaattttttggcggcttgctgaatgttttatttgaatgtattattttattatgtattaggataaagtagtacataactagtacatcaaacacattattttatgattagtaatacttggagcaaagctaagaatgtatcgatttaaatttaagtgtaattaagtaaataatagcactggtctagaaatagaattggttaaaaaaaataatatggaactcaaatggcagcagagacattccaaagttctcatcaaggtttccccaggaggcctctcccacctccctccaagctgagccgtctgcccttccccattccccttcaccttccagggcttccctctctctgagcatccctgcactgtaatgcgtgtttctacctctagactttaaccttaatgagggcaagatggagacttgactgacatgtgtgtaggcaataaataaatgttagttgaataaacagtgcaagctttgggtgtataaagcactacatagagtacacttcaaatttcccagatttcaggttgagccttgatttttataacactgagtataccgtttttctctgggagagactaagcaatgtggcaagtgactgaatttaaaatcaggagatttagaagggtttaacaactttgttctgacatggttgggacctagaaggtggtgaaggaataactttcttcatatgaagggaaccatgctagaaaggaatttctttataattaaagcttaggatggttctgaaatgttatgctaattagtaattgatggtacgagcattttgaaagcatagaatggtatatcaatgctaattttcatggaaatttagatagtatctgtctcctaatagaaaatagcacttgaaagtgacattgaaaatggcatttgaaaggttgatataattcagactactttggttaatgtttctgttcctttaataagctccaatggagatcagaaataagaacattttgaatgtttttttctacattattttttctggtcatttgcccagttagatgatggagtatggatcatacttaggagaatatgtgcagtttgctgaggtgttctaagttcttcactcatccatatggctaattaacccaaacttgggcagaggtattaagtgatttccttctcaagaaaaagtcaagggtattaatgtttcactaccccctggttgttttttgctccctcccttttaactttctttgaaagatgatttgaaggtgttttcgtccattttgtgttgctataacagaatatctgagactgggtagtttataaagaacagaaacttatttgagactggataatttataaagaacagaaatttatttctcacaattctgaaggctaggatgtacaagatcaaggtgctggcatctggtgaggaccttcttgctgtaccatttcatggcagaaggtggaagggcaaaagaggaccagtcctgtctgtgaagtccctttataaggccatttaatacaattcaaaagggaggagcccaatggtttaaatacctcttaaaggccccaccaacagtggggccaacaatactatcacattggccatttagttatgtttagttttgttttgagacagagtctcactctgttgcccaagctggggttcagtggtgccatcttggcccactgcgacctctgcctcccgagtagctgggattacaggcctgcaccaccacacccggctaatttttgtatttttattagaggtgaggtttcaccatgttggccaggctggtctcaaactcctgaccttaggtgatccgcccgccttggcctcctaaagtactgggattacagtcatgacccaccaagcccggctggccatttagttttaacacctgaattttggagggaacatcttcaaactgtagcagagggagtgtggagatacacaattttgtaggcttattaaggaaactgataaattatggttcctcttgaggaaagagtacatgctaccaacctaaaaggaagaggctgatgcacaaaatataatttgaagagtttacttgagccaaagtgagggcagctgcccagaagacttaactaaccttggatatgagctcccttcagcctttgttacaaacaggcttttaaaggcaaaaagggtgacagactaggctgatacaaagttgtttgtcaggaattctctttggtttgcagaaataacattgatcagtgattggctattcttttttttttggtgtggtattttaaatgtcattttctttttttttaaatatactttaaattctgggatacatgtgcagaacatgcaggtttgttacatagatatacacgtgattggctgtatgtttttaagctataggatgtgggttatagtgtccagtgtgacattattaggttaatgtacagctgtttatggcaatagtaagcggtttcaagagatgaatacatagcttaaagtggggagttacaacatgattgctgtctcgttttcatgccttccccagcctgataatttaaaaggacttgccttcctcagataaaagaactttgctttcttcagtgcaaagtaactatataacaaaatataaaataactgcataataaccatataaccatgaggaacaaaagataacagtagttcaacaaaagctttaatcatagttataccaacttgataaaaagcagcaagaccagaggtgctacgagtcacggtgtgatttgtgccattggatggtcatggcctcagtgaagacaagactcagttgggaagagattctgcttcagccagtcctttattctgcaggcctattgccttcaggttgccacagcagctgctcagagttaggttcacaaagattatgtacaaagacgtacactgcagcacggtttttagaattaaaccgtggatcatccacatgttggaataccaatcatccaaaaatcacattgaaggagaatagccactgtaaactagaagtaaaatcccaagccccccagcctgctgaacggagcccctcttagccaaggggacccccaaaaaacctgaaaaactgagttattggctgtgatgagaacggaggtcagacacaactcatgtcctcctagaagttaggcacaagtgaccagcattaaggttaaaatagagatcataagactgacaaaatagactctttgtgaccataagatacagaattataaacaagacctaaggccatgcaaggcaagggttaagtcacaccctgtgaaccataaaatctcattaaatgggttttttgtaatgacccagtataatgtgacttactgtccaacctgactctggtacagcctcacatgacagcagactcccttctcttaagcatttctttctactgacgtcaaggtttcacacaaagcttaactctttcaaccaattgccaactaaagaatccctaaggccgggcgcggtggctcacgcctgtaatcccagcactctgggaggccgaggcgggcggatcacgaggtcaggagatcgagaccatcctggctaacacagtgaaaccccgtctctactaaaaatacaaaaattagccgggcatggtggcgggcgcctgtagtcccagctacacgggaggctgaggcaggagaatggcgtgaacccgggaggcggagcttgcagtgagtcgagatcgcgccactgcactccagcctgggcgacagagcgaaactccgtctcaaaaaaaaaaatccctaaaacccacctatgactcataagcttccacttcaagggtctcactttttcacactgagccaatgtatgccttccatgtattgatctgtgatttcaccacaattcctgtctccctaaaatgtataaaaccaaagcgtaacctgaccactgcaagcacgctttctcaggacgtcttgagactgtgttccccaggctatggtcactcagattggctcagaataaacctctgtaaaatactttaccgagtttgattttttcctgtgaacaccaccaacaaggggaaaatctttagattatgttgctaagtgaaaagcagtagtctacaaaacagaagctattgtgttatttcatttttattcaaagataatctagttttacatatgtgaaaacatctgtaaagtgttaataagggttacctttgagtgatgagattatagctgattttgcttttgtgtgtgtgtgtgtgtgtgtgtgtgtgtgtgtgtgtgttgtcttttctatgcaagtatagggtgggggctgaaaactcagattctggagtgggaatatgtacttggctttgtcacttgtgtgacctctgtgagttatttatttatttattggagacagggtctggctctgttgcccgggctgcagtgcagttatacagtcctagcccactgcagccgtgaattcctgggttcaacagatcctcctgccttagcctcctgagtagctgggactgcaggcacatgccatcatgcttggctaagtattttttttggtagagatgggggtctcactgtgttgccaggctggtcttgaactcctggccccaagtgatcctcctgactcagtctcccaaagcactggaattacatttctgtgagttatttaacctcttgaaacttcagtctcctgatttctacaatggactaataatagtagctactgcctagggttattctgaagattaatgagataataaagtatttaacatagtacctggcacgtgataggtactttaaaacatttttcaaagaaacttgggcgtatggtataaggagggaaatgctgtgaaggaaggaagaaggggggctgtgagttcactttgtaagtgctgccttaagatgcaaaccagtggtgggtctacctggtgagaagccacagtactgggccccactaacaccggaacagtctttcttgctcagcaaatctgtgctcggaatatgcagcctaaagaacaaattcccattcccacccccgattctcccagggaaatttcctcatttatatcctaaagggcttctcagctgaaaatgccaacttatgaatgttgaatgtgaatgactcaaaactaccaatggatactaaatctttcatgtagttttgaggaggaggtgtgcagagataggacctaactcactctgacaggcttgagaatgggtctgtgcttcctcctgaagccaaacttctgctttctccaaggagcctacgccgctgcatccccacacgctgtgctgaacaggcaagcgcttgatttgaggctgttacagtgaacaaagaggctgatgaatgaatctaattattcacgaagcaaagctgatgagaaggcaaatgccagcttttgaaaatgaagtctatgcttctgtgttcccttaagcaaatttcctataattatgcctcagtcaagattgttcatgcttcagtttgggaaggcattattgaaagagtagcacctttactctggtttgatgtttccttacatgcaaattgtgcttatcttttaaattaaccttctctaaaaggctccttttttttcttttcctaacccacagaagtcagtattacagtggttcaagtctgaaaaacttgaaggttttatataatactggaaaaacaacagcatggtaatgtacttggcacatgcctgaggctcccagcataatcagtattgacaaaacttactcataagctgagtggagttttaaatgatttagtttaagattgtaaaataactcaataacatttcggaagtcataagtggctaattaggtctctgagttctatttgagtttctgagtttggcatccatcttattctaatttggaaacttaggtagaactttattttctgattggttgttactgagtcttgcttagaaaaagatagctttgtccaagtctgctcatgattcagaagtttatacacattcaacagacagttgttgaccacctatgaaggcatcatgagaagttgaggtcttgacccctgaaatctcagaacaatggtgagctctgctgaattttttgcagtgcattctccgtaaggaagcaacactctcttccaacaccttacttcctagtagctgttggaaatgacaccctggttacacatatccatcctctccattgtttctaaacccatgcctctgcaggagacgtatttgtatccactcatttaaagccaatacttggccaagtgaatgtgaatctgtttttctcagctcaagtacccactgaggttttcccaaggataaattcctttcagtatctaatcggccttacgtatctattactcaattagatactactttgtgttgtctcctctttgtccccatgtgtatctcctatgtgtcccatgaacagggaccaagtcttcctggatcacctcttccccatcatgagtactttggagcagcttatgtgcctgccggtgaggctcctctgcaagaatacatcatcgtatttaactgcaggttaggtggaggcaaatgaaatgaatcctctgatttcccatgctatcacaaagaatgactttcgtgaatattttctgtatcccaagatattccctgcccaaccataggccaacacactctatcaggtaatacgtgcatatatgtcattaaatggaaggcatatttattctgaatttgttatgagacttgaaaaaggtccagacaatttgggagctttcaggaacagagaaaaattgctcttatgccttctaaatcattttgatccagaaatgggaataccagctgctattcaaaactaccgtgtttttgaggaacttatatattagttttacaatctaaaaagtacatggaatgtgaaaagacctgatattaccgtgtttccaattaaaaagcagaagctctactgaattttcagcagaatagtgttaaatcactctgctagctagagatgcctcacacagagagaggagccctgagagctttcacttttgatttcatgggcagcagagaggcttctgtctatagtagagccaagttggacaggatctggcctaggaagagtttcccaaactccttgttcctcttctattgtcccttccaaagggccctaaactagaaggcgctgtgttgactgaattgaattcctgccatgtacatagaactaccagtgctcaataaatatttcctggcttgagtttccaggcaagatgggattccatctctcctaagctgagaatggtctcctctggtagtaaatatctcttcctgaattatgtacagatctttctttgccctctggttcagttctaagctcttcccaggatataccctatgtctccatagctgcagttataaccctcctcatttaatttgttcttcagaagaaactgagaatgtcatattcacctctaagttccaagaaggagttgtacacactctagatctcttcttcagaaaccagtttggccggactctctttaaactgcctttttccactcaaacctacccctcctcccctcgtcagctcagcctttacgctcgcgtaagacacagcaggccctggcatatgtgttaagtgtgtgccaatcccccatttgtggcacagcaagctgtctgtttggcagccccagatgcctcctttcctcatttttactgttttaggactctgtttagttcctcagatgaaattgcctgagaagccattttgtcacatttatgtcgattccttactggaaggaaagatatggggaatgagtttttcagaggctaaggagagagaggtgaggcacagactctctagtaataaaaacctgcctgtaatcaccgggaggtggaatacacattcaactgtcaacttgctataacatttccaaattagaggataataatatgatttaccaaaagttctttcgctttctaaaacactcaccaaaaaaccccacagatctttggtatatgtgcaatatgattatagttaatgatagttccaactaataggtgttattctatgtgctttacctatattcttatttaaccctcaggcatcccagaaaggaagatgctattattttcacttcacagatcagaaaactgagacacagaaaagtggaattatgtgtctacgatccatggttaatgggtggtgaaagatacctgttgtgttaattcttgacagagtgccccatgtgtgtgattttagccaatgttattggatctttagcaaaaccttagaaaaatgacaaaaacatccaccctcttctgcttagcaacctttaaattacatttaaaaatgcctaagaaatctgtttatggctttactatgtgtacagtgaagccattttatgatacatattttgaaatttggtaaagcgtggctgtttgttctcagcaagacaggctggaaaatagggggacaggctggagaatccagggcactgcccctggattgcaggcgcaggtgtatattgtgatgaaatgagacagactcagattacaattctagctctaggacctcgcgcaagttactcattcatcaactaactcgttcactcttttaacaaatgtttattgcattcttacaatgtgccagacgctgttgaggtactgacagaaatgacttgatctgatttggattttttaatgatcattttgtcagttctccacatccttctctccatcaaccatatgtgtgtgtgtgtgtgtgtgtgtgtgtgtgtctatatatatatatatatatatagtaagtatatatagtatatatttaagtaagcatatatataagtcgtatatatatataagcgtatatatatatatacagtaagtatatatatatatatatagtaagtaaagcaagttctttcttcttcaaagccttcttcaatatttttaatgctggtagaggtcctagaggcaaatagtaagaaataagtaaattttgtggcctataggaatatacatatgaataaattagtgggctggcttctccacagtgcagatggagaagcctgtacctcaccaacctgcgcacatttataaccaagtggcccgtagaagtttccaggcctctgaattatttttctcagaaagcttgattccacacagtttgcttaccatggtcaacacagtggcagattttggcataccaccttatttgtcatttttcagcactacccagaactactaaccatgctgtcgagtctaggaagttagctaataagcttccctttaatgagatttgaaaaggattgtcagttggaaatgacagttggtataagaaaagaacatagtgttcagaggttttgctagggctccttaatttttaggtatttgaattgaatagaaattagggggctttttaagatctcataacttctgggaccatgaaaagataatcagcagggctttttcaatatgataaaaactcatgtaacctcagggttttctaccctacacaatctttgtctagcgggtgatgttttcatggggagctttcctgacatcatatcagtactacaggcagtgcttgtgggtctgaccaacaacttcagaagaaaacccatacctttctgtagaacggtttagtacaattttacattttgtgagtctcctctctgattcttggctcgtctaacgtagtgttcctcaaacgctatttccttttttaatgaggccaacgcaaattaattattaaaataatatctctgccaatcatgtttatctaaatttctgttctgcccagcatttaccttgttgtagttacaccttttacagccacccagttctcttcccagaatgattcatgttcttttattaagctgagctagaactttatagagtccatgaggtgctccaggaagaaagagtcaacatacaggatgaagaaagagggtagagccatattaactgattttcttcctttgtcacatacgactatttttcatccctgaattctccacatccttgtctccatcaaccagctctgtacgtcctgctgcctccaccctcaccttgaaaatattttttgttttttttgcactacattttcccgctgtccttaagcctgaaaattttcactttctctgcctttggcctaaaactccctgatgtttcttacatatttaccttcaatttttgcagaaccatgtatcttcaaagggaaaaaaactccctcaggcccacctcaccaaacctagaaagaagaccatcaaaattactaataaagcatcaattcaattctgaggtcattacattcgctattaaataattcacaggtcattaactgcccagactgtgtctttcaagcacagctgttgaaggaactaaatactataaatcattaaccatattaaaggaaaagaatgttgggggagagcagtggagatggataattaaatcaaacagtagtgacactgagcaggatgaagcaatgggatttggaggctgactctatgccaagagaagatcgatattccaaggtaatgcgtgtctggggagtaaatggagctgccaagccagtggaggccatggaaagacctgtgagttagggaagaaacatttctatagatgtaagagtgctggccacttgccatgtgcagtgtaaaataaagtcttgacagccaactcgggaggtcttgaagaggttgacagttaagaacagtgaagtagatgtttgttcctggtagaaaatctaagggccactcagaaaaaaattttcttttctgcatccctttctgtagccacgaacaaaacaccaggagaagctgcatgcagctaacttttggcagcccttcgttaaacaaatttgcccaagtacagttttcaattccccaactctgacacaaatagtaataatagtaataacaaatatttattgagtattagatgcccatgattacctcttttaattttctcagcagctttaaaaaaactgttctattattgtttccttttttacgtggggctctgagagattaaacgacttgcccgaggggacaagttggttaagcggtggatgtgcagactgtctggttttaaaaaccctccatttcatcagaacctgctgtgcagtcaggcacctcccgctgcttgttggtagatctagattctaagagagacaggaagaaggacttctttacacacttgtatttggtcttgtgtaatcatgttaatcagagtacatataagtaaatacaatacatttcctcagccacacacataaaggaaagatcttcaaagacctcctcagctgtctttgataattccgatggttataaaataaagcacttagtgttaacgggctttaaaacaattgaattatgcaaggtaactcaaaaagtgaaccaagtacaagtcaatacaacataagctttctctttttagaattataggcttccaatcattcattccaccaacaaggactgtgtttcttcctgagcacatgcagagactatgggacaaagatgtgatactgtgcccactcctattgtttctctgaggagcacagagattctacagcatgtgccagacaatgggggatttcaaatgaataaaatacaagttccaattttctagtttataacccaacgggagaaatgcaagacccctgagtgactacagtacaaagaaagatgagattgttgttcctcaaaatgttataaattttgaatgatcaccttttacttcatgacataatatagaacccaaacagattaggcaaacagatctctggcctgaggcagctccaggtatcccacttgaactgggatatgctacaagccttccagtgagttaagtacccagacagaggataccagggcagaaccttcacaatccttctgtgagctttaacgaaagcctgctatggctcccaccactctccctgaggtccctgctaggccccagagtcatccaaaggctctgctcactcagatggccccataacctcaaatagccatatcattgaacttctacacttgctcatgtctcagaaattgatttttttagtataagcgttctatgacttcacaaagtttcatttcccccagagaactctcaaagagaattcctcagatgttagtttcttacacacaaaatacttccagtaattaagtttccctgcaaagttcatctcttttttcaaagcttctcattcttttacttagaccgtggaaactcctcagctcaatagtagcatgtcttgaatgactctccattgcaccttataggtgtgtttgtcactctctaaggaggactgctagaccgcctgctagcaaggggcatcatcagcccccagtctatctgcaagatgctcctgcagccaacaatagggcagctgggctgacggggcaatggatgcagagtatccatgaagtgcaggaagagggtagcaggtgtttcatgccacagatcccgaaaccctaaattcagatggcttctggcattaggtgttttattgttttcaggactctgcattgtcttgatcagaattgcttttaaaagcatacctggacatgcctagtattttctcacttgcaaattacctcacaaagttcttcaccaccctcttctctgtttctttctgaatatgaagtatatcagtctgtgtccaatcagaagacagaaaccacatagtaacttaaactaagggaaatgtaatataaagaattacttatctctggttcaaaactgttaagaaaagtatttatgttacaggagggatgaggggtgtatgcaaagctaggtagggttcagacacatcggagaatgtgtgattgcagccctctggattccaaagttggctggtctgcctatagtctaagtgtggcccaaatgttttatgggatatacttatgttaaggaattatggttatttatctgaaattcaaatttaacgagaatcttgttttgttttaataaatctggcaatcctgcctctaggatgcaagtaaggcacaggtgagccatagcaggtggccaggcatgcaaggaagcagagggaatagggggtctggcctacatggcatccatgtggagaaagccataagaatgttaccaccagcccaggccagggctgcaagggcactgagggactatatcttttaggcacgtggctgttactgagcatcaccagatctcttcacacccacaccagtggcccaccatgcaccagttgaaaacagcaggagagcccccttgctcctgcactgtccctctagcacccctactaagaaagctctacctcatgctgtctgtgcaggagaaaagctgaaaggaaacccctcccttatcacaaagcaggtattgaaggacagatttggagctgagatgcaagacgttgagaactggcacctgaagccttattctttcctctaccaactgcacaaagtgttttttttttcttaactcattttataaggtcatcttcctttcatataaaatattaactcatgttaatcttacacaatctctgcagagtgaatgacacatgataccagctctgatatttatagagaatcatggaatttggtaacttatctaccaaagctgtttgttttttcctttggtgatttttaaagaaaaaaaaagggagaaagaaatttaagagaattcccctgagctgcagtctcataaaacacaatcacacatgctttctgttccatggttaatggtgggaagacagtcactgacacattgcttgtctgtgtgaaaagaacaatttttcagtatcctggattcttttttatttttaattggggaattaaagctgtcaagttctaatttcaatcagttgtgagcccaattcttccttggcaggcttcaacctggaagatagttcaaacagtgattacatttttctaaggagaggtttagaaatggaggaattctgaagttgaaaaaggaatggctactggaacacatgtatgggttagcttagccaggctttcttcctctccctacaaatggtgaacccatatttttagaagcaggtgattttcccccagggtattgtatctttgtgataaaacagtttatgaaaactctattcagaaattctgttttgttgtagaataaaagatttcccatggtgcaaacctccctttaaatctcttaatagtatttaaattttattggcttctaattatgatgcttgtgagtttttttttgttgtttttattatttttttcaaaagcaaaagtaattcattctggagatgggagaaattgcttatattcttgactcgctagacactagacagagcttgatataaaaaaagctatgtaaaactttaggctaaatgaaaaacttgtgaaaatagacataaaattctgtctgtttttcaggataggtcatagtttctgggagttcttgcattagattgggagcccttggaagcatttcttttaacccactgtcagtctgttcaggctgctatagcaaaataccatagactggatagcttataagcaatagaaatatatatctcacagttcaggaggctggaaagtccagggtcaaggtgctggcagattccatgtctggtgaagacccacttccttgttcatagacagccatcttctcactgtgtccttgtgtggtggaaggaattgggggtctctctggggcctcttctgtaagagtgctaatcccatccatgaaggctctgcccccttcacgaatcacatgttcagaccgtggcacctaatatcacagtcacttgtgcatgtgcttgagaaatgtgccactgaaagtcatgattacagaaaatcgaagcttgatttaatactttcttccaggcaaatgaattaacagggatgcaggaggctttttctgaaggacttttccccactctctgcactggaagacacgagaactacactaaaataatgttccaggcaaagccttctgttaacaacatgcctctctgtgaggtgtgtgatgaggatctctgggccagcatagcccttccttgaaaggaagttggacaccaacagcttcaagaacggcaaggagcacagcaggttcctactccagcttgcgatgtgatcattgcctgaagcttcttctcttgttaattagagaacctgattcttctaaagtgtctccactctcctttataacatacagacacatgctttccctccttctcccccaaatcctgatactcacatattcttcttaccattcccttcctttccatggcccaggagcatttcccatttgaaatttctgagtttctcagactgaatgaagacttagggacctttttaggatatacactgagctttctgctgggtacagtgaaccgacgttaatcaggaagaatttaattttaaaagttgaacattcatccctagttctatcacctaattgaatggccacaggcctattaaatgaattgtgttatttcttggtgacttatgaagggaatactaaaggtgatctaaaggtggttcattcattcattcagcagatatctgttgaatgcctctggatgtggccaaatcagaaccctgttattaccctcatgaggcttataacctagcaaggaagacaaatgctaaataagaaatgactcttgtgatgagcggttacaaaagggaactgcacagagatccacgtttcagagcacttttgtcacgcaggtgcttcaatctattaactcatttagagctcacgaaactctataacatacttcctctcttatttcatccccattttatagagaagaaaaccaaggcacaggtttgtacagggacacttagctgctaagtggcataagcaacattcgaactaggaagtcggatgtcagggccctcaagtctacaccaggaactaactagagatgccatccacaggatttttcttcagagcctttctctcacctccctccctcctactgcactctgccttcccatcccatccccagttaggcttattggcagaatcagggactgagaaaggaagaaaccagaggaaagatcagagcatgtctggtgcccacacgtccagggaggtgagcacgtgccactcttgtaccaccaagaagcaagaaaaccgaagtgggtcaataaattcccagcaggtggcatctccaggtgttaagttggaccacccaaaccctctccctaggtccccattttctgctccatcgtctgcctccccagtccctggagttcactctactgttccaccagctccatgattcctgctgacacctggcattgcctcttcaccttgtcctggtctcatatatggtttaactcttacccatttctttttctgaaaaaaaagttcaatgccactgtctttgtcctgcagcaggggtttggcaagagtgttgagatctgatggccattaagttcataagatgtggggctccttaagactggagcagtgctaaggagaacttagaagtcttagaggcattcaatgcacggttggctggatttttcttcagagccttcagagagggttacaaagaaaccctccctccttcacctcctttgagttctgtgataacttgagaagtaaagaaatgaatttgtatctcatttggaatggaagacacattgtaatttttttttctggaagaagaataaatattgaaactattggttctcaaaggaaggaacaaatgcgttaacatttgggagttttgtttaagtcatgttagtcctgtcttgctgcctaatttttccttttgttattaatttggcttggaatggaaccatctttacagtttaatttaaccacatctcccatgtagaaaggattgttcttctagcatatttccttcacaatgctggctccttttccgccccagtacatttagtctgactttgttggaggccacgactgatttctttcactcagttattccgagacagagagtgtaggaggagacagagagggacacacacagctagaggggggctgtttgcaaacattgattcattcactcattcacttagtcagtcttatttttcatgtttattggacccaaaaacatggccagcactatgctacttgctggagataatgaacaaagccaaacctctgaaggaccacttagctagcttgcttgcttccttgcttgcttcttttctgcctgcatgcctgccgccagccctccctccctccctgccgccctcactacctccaactcctctctctctctcttcctttagcctttcttaaggaacaatattgaataggggactcattagaaatcagtctcttctaatagtgatttattttaagcgttcccacttgtaagaggaacatctctctagggcatcagagtcattcagattgttgtgtgattctgagccagaggccaggagaatcctgaatttgaacttaaaaccctgggtctcaccttacttggtagctgtgggcaacaggcaagtcattcccttcccctgagactcagtcccttatacctgtcacagatacctgaccaaagaatgacctaattttctttcagtgaccaagctcaaattaacatgaataagccttttatttcattcattcattcattcattcattcattcattcatttgagtcagaatcttgctctgtcacccagactggagtgcagtggcacaatctcagctcactgcaaccttggcctcccgggttcaagcgattcttctgcctcagcctcccaagtagctgggattacaggctcctgccaccacgcctggctaattttttattttttgtagagacggggttttgccatattggccaggctggtctcgaacttctgacctcaggtgatccacctgtctggacctctcaaagtgctgggattacaggtgtgagccaccgcacccagccaaaccttttatttcttagtttattttattttagatggagtctcactctgtcatgcaggctggagtgcagtggcatgatcttagctcactgcagcctccgcctcttgggttcaagtaagtctcctacctcagcttcctggatagctgggattgcaggcacccaccaccttgcccatctcatttttgtatttctagtagagatggggtttcatcatgttggccaggctagtctcgaactcctgacctcaagtgatctgcccatctgagcaccacacctggcttatgaataagccttttaaagtactaagacttgatgatttttttccttcaattatatatactcaaagagaaaaaaaaaatgcagcacatattttatgttctaaattaatactttcctaaataaggtacatatccccccaaattacataaatatatactctcccttatttgtgaatactgtttaaaaatttgaccattttctggaagaatttgtactttcaatgagaaagcaaaatacttttatcttcagtatttgctagatatacaaatttttttcttcagactattttccagttttctgttactattaaaatatctggtgtaattcaagttaatcttcgtatgttatttttatttgttcatttcctctctgaaagtgtttaaaatctcttttcatttccaatattctgaaattatattatgatatgtgtgtgggcctttttaaacttttgccagggattggtgggctttaaaattttaaaacgtaggtctttcagtccttgggaattttactattatttataatttcttctcctctgattttgagtatttctagaactaccgcaattagattttgaatatcttagttaagctgtctcgtcatttttgcttacattggtcatctttttttctttttctttctttttttttttttccttattttaaaagagatcccttttactccctctgagactttgagatattactgcccctggataggatacatccttcttgcattagttttttagtcatttcaatttctttgtgttcactctgtcttataagtaaattattccttttaaacatccaggttattatttcagcattcagtgctgccaatcctatattagatctcctctattgaattattgttttggatttttaaaaatttctaagctcattgccttatccttagattattctctcgaaacatctttgtaaatgtcccgaagaattcttgtctcttccattttacctaactcaatggtagccatatgttttctctagttggtgagcctcctctaagctgttgatgtattagatgaggtgtcatgtaacaatatgagtaggtttgtcatctcagaatcacagcagattgggctgtggaatcttctggcattattggacagcaaatggtaaggtaaagagaacgatgttggcttttccaagaaagcaaagctcctccaaagctactggatctccatcctccctggcactgcaactgtgctgggctctaagaggctgccttctctccgtgagcactggcaccaaaacggatgcctcggaagtactcatcattccccactgtcctccttcgtggccatacagatagctgtgtgacctcaacagggaggaggaagagggaggaggaagagggaggaagccgtagcacgtgccccggcagctaccaacctcctagaccttattattttttaatagaactaatgagccactgtagacagtgttcttgctgatccgttttaagtgtagaatgtttaaattttatgcataattgaggcaatattactcaagtaaatgttatttttaagtaagtttattatttttgagcacagtctttatttttaagcctaattgtttctgaaagcaaacattcctatagatagcttaactgttggactagaaggttatatataatcaaagcacagtatttcccaagaagcagaatatcctagtcataagacaaatatatgacagggaagagacaactcttagaaaccacccttgtaggtccaaacctgtagactaaaaatgaagcatcaaagcaacctgtgagagattctacaacatagttttcacagtatttgaatagatatgttaaaattaaaaatgcattgtgctaagattctttttatttttacagctggaatacataattgattatcttaaaagttcccttactctcatttactgaattatttgaaagcaacgatgtgtcatgacagaagattttcaccctttcatgtttccccgttagtcttctagccaatgaattctaaaatgttggtaattaaattgattgaactgtactggttaataagaattaaagcccccaagaacaggcgaactatgatttttttcattgttcacacaaattaatattttcagaagaagagattgatggataagataaatttctgctgcaaaccttgctttcaggaaataggtgaaaacctttccagaaatctataattattcatagtgttatgtttccctttgatatatgcttgaggctcattagcattcttttcaaaagctagtgattaattttataatgctattagggatgcatatgtatgggataaattatattttagaaataagataatgttaaatactgaattaaaatagtggttgcattacaggaaagtggtagacatatgggattaggcataaacacgcagctttaatgcagggcttctcacccttgaagctgtcaacattgtgagctgaataattctttgctgtttgggggctatcctgtgcaatgcaggatgtttagcagcatctctggcctctaccgactaaatactaatagcatccccctgacagttgcgacaagcagaaatgtctccaggcattgctgcacatcccctggggatggggcagtgggtagcttggggaactgaatggaccctaattgagaaacacagcttttttttttttttatcaatatttttttagaggtcttaccagtgacatagggcaaggaaaacaaatacattttggaatagaagaaataaaattgcttcagtttgtagaggcaatgatattctaggaaaaaaagaatcccaaggaatctagaaagcaaatacaagaagtaatagcgggcttaggaaagttacagtgtatgagactcctaaacaaaagtcaattatatttctcttcactcgcagcaaacaaatgaaaataaaaataaaaaagctgttccattcatgataatgtcaaaagtcatacaaacaataacaaaatgcttagagaagatcaacaaataaatgaatatatatgccacatacatatgtcaattcttcccaaattgatctatagatccaactcaatttcaacaggatatgcatatatgtatctgtatggagaaacacagctttaatagtagtacattttggtgaggttctagtttttagggtggaagattcacaagtatccattttattatgctttataatctacttataagttacatacattctcttgaaggtatacgtgttttatcatcaaacatattaaagctgctggtaatatgcgtttaaaacgaggcttactggaaatgaacttggagataaattctgtttgatttcatcatggggattcatggggaatgtggaactttattttccattttttaaccacagtgtactagcatgttttcttttgtgccattttgatgagtattttgacaggatgtttattttgaatcttcagcctttgagtcatttactcatgcaacctgtgcaacaggctctttgctaaaaattgcttgagtttttaggccacaactaaacaattttagtctaatattaaaagcacacatataaaagttgagggacttcaaaaattatgtatgcagaaaataaagtacaacattatctggttaataccgtaagaatagcttaggaaagaaggaaaatccttctgaaacaagcttaaatgacaagtaatttatgccaaagatttagaggaactcacagaaagtcatgaaactggtttgagtgggacagtggtggactcccccgccattttctcattcatcatttctctctgttgcgaggacgaggacagtgtctttttcactatggtttgctctctcctggtgctcctcttcctcttcctctcctcttcctctctctctctccttccttccctccctccctaccttcctctctctccctctccctccttccctccctccctcattctctgaagcttgacttctcttatctttctattatgtggacttggacagtcatgccaacctctgtatgtgtatgacttcccaacacagctgcttttaagtaacttactttgtggctcaattttgaattcccaaaagaagaaatttggatggctcagcttaggttagtgcccacatttggtccaatcagctgtgaccaaatagagactacatgttttcacatgggacctaggctttcccattctgtgtcctgcgggtgcctcgggtactattaaaaggacgtgtcgtcagggaagaaatgatgcatgtatacgctgcacataacatcaactcacaaataccctgtgaagattttgtttcctctttacgagggagacagagaactgctagatatatggaagatagatctagtttatatcaattcaagagtaggtagaattaaactttccttatcttcactggaattaaattcttcaactagttgtctccttaaagttgctcatttcctcccatcttcctcgtgtgcaagtgtaatgtgtaaatgtgaacacgccattgttaaacctcttcagaatctaatattccattttgataacactagttatgaaactagttttaacctagaaactagtgtttaacctagagataacaataagcttctggagaagattcggaacggaagtgataataaataattctttagcaattttacatgggaatgggtatcctgggatgatgcattaactactcctactcaacaagtatctgatattatctgtgaattgtttctaatcaaaatatgagtctgggaatttttaagttgatcataaaggagtagaatcacaaacacagtcatgtcctaaaaagcatgtaacagacgcacatcaaaggatggtccccacagatctgtactgtaggaaattggtggtgacatttagccctacccatgtaatatcatccacacataaagaacagtgaagagggctgggcacggtggcttatgcctgtaatcccaacactttgggaggccgaggcaggcagattgcctgaactcaggagttcgagaccagcctgagcaacacagtgaaaccccatctctactaaaatataaaaattagcaggatgtggcggtgtgtgcctgtagtcccagctacttgggaggctgaggcatgagaattgcttgaactcatgaggcagaggttgcaatgagccaagatcgcaccactgcaccccagcctgggtgacagagcgagacactctgtctccaaaacaaaacaaacaaacagagcagtgttgaggccaggtgtggtgcttatgcctatagtcccagctacttatgaggctatggctggaggatcgctttaacccaggagttcaaggccagcctgagcaatatagggagaccatctcttaaaaaaaaataaaaatcaaaatggtgagggactctgaaatctgactataaagcaaacattagtgtcctcaaaaagaataatctatagatgagatagttactaactctaccacatgggatttggaacagatctatgataaacaagtttaatgctagaaagtcttggtagaggaaggctctcaagaatatactccttttaaaatgtgtgtacatacaatcaacttgattcttcaaagtagtaacattaattttcaattcatcatggcattatacttttttctttaaaaaaattttaataaccttttagttaatattttcattttctctcttaaattttaacacagaattatttccattgaaatacgtaagcacaaaataaagtacgatattttggttactatcctaagaacagtttagtaaagaaacagaacccctccaaaaccagggacattctctattaaatttcaatgaagcgtctctgttaaagctcaaaggagttataatgagtaatttggagtttcctgatttttaacatttgacttcccaagaagcgggtaaaacctggaggttagccgcatcactttatcttgattagtacgaccaactgggacctgattttcacatcatcagttagcatatttgtagcttaacatttctagttctgaaccttagccttgtttgttgtttaagatttaattaggactgcctggatagcatgaaagtattttataaagcaacaatagaaaggatatactcttgatttatcactttttggttttggcatcaaaaaagattattttgagttactaataatgcctatgaatcatcagttaaacaagtagactgcggggccgaaagtaggaggatctgcagagatctggactcatcaccagcagctgtgcgcagccactaggccatggtcctgacgcgtcacattgtgatgtatgcatctctcggttgacatccggagatctctgggcaatgggtcaggggctgcacacagagaaactgacacatattttttttcctgttagaaaagaaatctataaaagcaaaaaatggttaatcatacttaatatactttcaaagctgtcttaaaaatatatttaattaaatgaagccagatttaaagatattttctgatctcagaagtctataatatttaaaggaaaaactttatataaatgtagtaccaggttctggcaaggatacagaatgacttagactaacagatattgctggtgggaatgcaaactggtacagacgctttgggtaaacagtttggcagtttcttataaagttaaacatatatttaccatatgactcagcagtctcactcctaggtatttacccaagtgaaatgaaaactacattcttgcaaaaatgtatgcatgagtgtttgcggcagctttatttgtcatcaccagtaagtggaaactacccaaatgtttctcaactggagaatggataagcaaactgtggtgccttccatacaatgaaatatcacttaacagcaaagagaaacaaaccactgttccacactacagcacgaatgtgtctcacgtgcgttatgtgtggtgcattccataccatgaaatatcactcaacagcaaggagaaaccactgttccacatgacagcatgaatgggtctcacatgcgttatgtgtggtgcattccataccatgaaatatcactcaacagcaaagagaaaccactgttccacatgacagcatgaatgggtctcacatgcgttatgtgtggtgcattccataccatgaaatatcactcaacagcaaagggaaaccactgttccacataacagcatgaatgggtctcacgtgcgttatgtgtggtgcattccataccatgaaatatcactcaacagcaaagagaaacaaaccactgttccacacgacagcatgcatgggtcttacatgcgttatgtgtggtgcattccataccatgaaatatcactgagcagcaaagggaaacaaaccactgttctacacaatagcatgaatgggtctcacatgcgctatttgtgatgcattccataccatggaacatcactcaacagcaaagagaaaccactgttccacatgacagcatgaatgggtctcacgtgcattatgctaagtgagaggcaggattcagagggctgcatactctatgactcaatttgtatgacattcttacaaaaggaaaactataggcacacacgcaaaaaatcctgctgcgtagttgccaagggctggggtttgaagaggaagatactgcaaaagaagcctggggacgatgacactgttttgcattctgattgcggtgatggtcacacgactctctttcaaaacccttatatgctcaaaagggtgaattttactacaagtaaattgtaccttaatataaatggaaaataattttcttaaaacctgtggttttctaatggtaattggatttaaaaactgtcactaacctacatattagttttgaacatattaactatttggtaatgtgaagcctttgttggctctgaatagtctagcacagaattttagaaaaggcttcctgtgagctgctgattcccatggagaaaaggaaaccagtaacaggacaaaggggctggttttcagcattcttttgcatgtggatactaagcttgaataacccccgtgaatattgacgagcggctctcataaattactccatgtttcttatgcatagctcttgctgtcattttaacataataactctttaatatataggatccctgttttctgggtcataaaaataactatagaaaaaaaatctgaagtgtttctgttagtgctcataaaattgtggcattctatatatttttaaaaaatatgtgacattgtaaaaaaaaggcctaaaattattttagaagtagaaattaaagtcatctcttctataaaaatttgtcaaatttttaatgtaaatggaaagaatttgatttatttattatatattgtctgtatttgcataagtgtaatgcatgaaaaattactctgcccttttatctaaatgttgaggcctgtattgcatgtctttgctaattgcaattctaacacaacaatatgaaataaactcaaatttaggttatgcacataaatgcagtaagtgacatattatatactttttaatcattaaatatgttttgtagtcagacagcattatattttaaccatcgcttcctaatacgtattacataaagacccaataggatgaaaattatttctataaccaacaaacagatatattctaaaagtgcacataaatataaattctcttaagtaaaatattgaataaactgagggacatgttagacatgactctctctctctctctctctctctctctctatttatatatatctacagctattaataaagataaaagcatatgtcttcagagatagatggagcatcaatatttagatagaaaaacaggtaatttgcaatggggaagtgatagtccatgaaccatatacaaaaatatatattttttcagatgtatcataaatattttcagtggattttcttataccacatacaggaatttatcgtgtcctaaaatagagaaaatgaagcatgccatgtaagactgttgtaacatagctatcttggcactgggcacacaggtattcaataaatgggaattactagcattacatattgcttgatctctacacacagctctgctggggccctgggcagactgtgaagccatttactatctttcctgctctccggccttcacttggggttccctgatacagcagtaaggactccactttctgatctctcagctctttggtgccccttctgtctgagcagcaggactggagcagatcctgatcattttaaagatgacactactgtgctccaaatgtttgtgtacccccaaatttatgtgttgaaatcctaacccccagggtgatggtattaggaggtgagagatttggcagtgactgggttaggaaagcagcaaaaccctcatgaatgggattagtccccttagaagaagaagtcagagagagatcctcatgttttccaccacatgaggacacagtgaggaggcaccctctgtgaaccagaaagtcgaccttcactagacaccgaatctgccaatgccttgatcttggacttcacagcctccagaactctgagggatacatttctgttgtgtatggtgttttgtgatagcagcccaaatggactaagacagtattttagtatgcctgaatttgaatcagtcacttgaggtcttttatccctaattttacatagcacagcatctggtatatattagatattcagtaaagctttgtcaaaggaatgatacttttcctttgtaaaataattttaggcatcattaagtagctgcagaggctctggctggagggttacacacgaccatcatctctgaagtcaaactttctaagctaaattgcaaaataacatggtacttttagagcagtgtagatggggtgtgggatggagaggtacaaagaggtcgtccccagtggactcttcagattgactcagtgctgccttggggctggggctgcaggggacctgtgtgacaacagatgaggactccaagaactcataaacagtctgatgcaaatggcaactggccacggggccgagtttcagacacagtgtcccacgccaggagatgagggccagtcagtgtcacagagggttcgaggagtttctaggcagaataagagagcaggggaaggcttgacaaggtgcatgctgacgtggaatctgaggccagcaccacggtcaccttcattctgttcctcccagagacaagagaaggtgcttccctcagtgctgaccagttgattgctattggaaagcatggccaggtaaagtgacctgggtctctgttatgggttgaattgcatcccccagaaagatatgtagaagatgtaatccccagaactgcagactgtgaccttacttgaaaatggggattttacagatgtaattagttaagatcatactgtagtggggggcgggaccttcatccaacttgagtagtgtcctgataagaagagaaaatagaggtgtagggagaagatgccatgggacaacagaggcagagatgagagtgctgcagttacaagccgagaaacctcagagatgaatgggcaccaccagaagaggcaaggaaggatgcttccctgcatgtcccagaggaagtttggccctgctgacaccttggttttggacttctaacctccagaacggaggataagtttctgctgttttaagtcatccagattagggtactttgttatagcagacctagggaactaatcccgtatctaaggacaaatgctctgtttatctactgaggaacactgtctgctgtgtctgtggggccggccacacctccatgcagatttgggtctctccatacctgccagggtaactacccattttagatattcagattctgccatacccaagttcctcctctgggatctgcaactcttttttggatgttactattccaggatggctggaggcagagaaacatgtgcccgccacttggaagacaaagaaactgctctaccctcagagaaaatctgcctgggtgctgtcttcccctcagagattctctcccaacctcataacatctcttttcatcctcctgccacaaggaagctagatgcattgtttacattttcctaagagttaagcattaagttcatagtgtaaattactctccttcctttctgatatgctgaaatgtatccttctgcatacagtcttatgtgtgcctgtggtaatgaagactctgacaatgaagtgtgcccctggaatacatcgtcttcgttaataataaatacctgaagacacaatagcttagttcattaaatatatgcatataggtctgttattttaaagggaatagacctttagcagaaatttatttaaatacccttgcattgaatggactgtatgctccttttgagaggtttgtaaatgcatttgaagcagtaatgcataaaggcttgacactggatcctaccacatgaagcctaaaacaattggtcacattcagctcttcaaatatatttttggcattaacaatagtctgagtgatttagttaaccattcaaggttgcatttcagtaaagcttgaataatcattgcttaaattaagaactgtcagatacctgtaagctcagcactttggaaggccgaggcgagtggatcacttgaggtcaggaattcgagaccagcctggccaacatagtaaaaacccctctctactaaaagtacaaaaattagccgggcatagtggcacatgcctgtaatcccagctactcaggaggctgaggcaagggaatcacttaaacctgggaggtggaggttgctgtgagctgagattacaccactgtactctagcctggacaacagagtgagactctgtctcaaaaataaaataaaataaaataaaataaaataaaataaaataaaatataaattaaaaaaaatactatcagataaagatgaagaagagaccaaacccagattaaataataaagggaaggaatgaagaagtaaaagcaagtgaaaggttcacaggatgaaaaatgtatagaaagcataatgaggccaacgtcttattgaggagagctgtgatactgaacaagactgacccttatattgattgcaaactgtattaaaattactcagaaaagaaaactgcatatggtgtacctatctcaccgtccagatggtaagtggtgcagccgggatttcagtacagatctgagttgagaagccgtggtcttgtcactatatgcaaaacctcctctgccatatgcataggaaaaggcatttcccctggctttttcttttcttttcttttcttttcttttagttttctttgttttagggaacaaaataataccttggggaccttctctccaccaaactaacataaatatttagctttcctaaatgtcaattgggacaaatggtgaaccatgaatatttccactggtaggtgactgacagcccaggcagggccttgacgcagaggctgaccagactgtccttgaactcctaggagccgaggtgacgtacatgaacatgaccgcttacaacaagggccggctgcagtcctccttctggatcgtggacaaacagcacgtgtatatcggcagtgccggtttggactggcaatccctgggacaggtaagctttctacgttatgtaaactcaatgttctgtcaccctcaaagcgaccaccttcataaagcacgctactgcagataaggatcctaaaacctacagcatttattattcttaactgtagttttaagaggctcatcttccttttatgtgaaaggataaacctttgcttgtcaggatcatcttacaaaaaaaagtaaaaactgttattgcttcaatgcttttgtaattcataggctgctcccagattcctgagagcaggttgctatgtaattgacatcacccagacctatattttcaggatgatattacatcatctatgagacagggggaaacacaaaaattcagtagagagtaatatgtcttaggatagtaatcatttgggttatttctttaatctcaagatgaagatgttatctttctcttaacaaatgattaacttcaaatatgttgaaaatacattttcacacacttaggatttttatgcatttatttgtgtcagaggcaatccacagaggattacaaaatcaccatctttccattagtcatccagcgacaggaggttcctagtcattggatgcttaggaagactagccaaccttctcagaacatctttttaaatcaacactccagcatactcccctcctcttcctctccacacctacacacagatattgtctcctccccggcccattatttccccacagctctcaaaatttgggatcacgctattatacttaatcatctatcttaaattagtgttcctttctattatgctcaactatgtggaatttttcttggtctacctcagtgtgacataaagcattgcttagcaggacctatgcattagaacagattttaatttaccaaagttgaggctaacaattacaagaagaattatacattttccaagagttaaacctatgttatcagctttatagtttgtgaagttgtccagtgaaatcaatgattattgttatcaatcattaccttacatttatggtaagtggaagaaataattaacaacaataacagtttcaatgaattgaggctttctctatgctgggcatttttctacgcatgtaaagagtataacctcattccattttcacagtaattctttcttggaaatactcctcttataattttatcttgcaaaggaagaagctgagacataggtaagtaacttacccaaggacacttttcaggaagtggcaaagctggaactcaaacccaagccatatagctctaaacacctcactcttatttcactaatcttttaaaataaatacatttaggaaaaaattattttctttatctttctggggtgctaagttacagattttctctgtcacccttttctttaacaaaatctaacaatgcaattaatcaagaaactttttactcactggaatctttccaattgcaaatccataatgatatggtggtcataggatgccaactactcttgctcaatacttgagctctgcaaactcactaatctctggattgaactaggaaaactaggaagtcagtatgtgtttgcttctatagacatacagcaaagatatttcatctttagttccagaccactgcaataaagcaagtcacacaatttttttggattcccagtgcatataaaagttacctttacactatactgtagtctaagtgtgcagtagcactatgtaaaaacaaatgtgcataccttaatttaagaatactttattgctagaaaataacaatcatctgagccttcagatgcagatgtaagatttttgctggtggagggttttgcctcaatgttgatggctgcttactgatcagggtggtgattgctaaaggctagggtggctatagcaatctcttaaaataagacagcaatggagttggccacatcaattgacttcctttcatgaaagatgtctctgtagcatgtggtgctgtttaaaagcattttatccacaataaaacttctttcaaaattggagtcagtcctctcaatcccttccactgctttatcaactaagtttatgtaatattctaaatcctttttatttcaacaatgttcacagcatattcactaggaatagatttcatctcaaccactttcccttgctcattcataagaagcaactcctcatacattcaagttttatcctgagattgcagcaattcagccacatctttaggctccccttctaattctagttctcttgttatttccatcacatctgcagtgacttcctgcactgaagtcttaaacccctcagagtcatccatgagggttagaatctactccttccaaactcccgttaatgttgatatgttgaccttctcccgtaaatcccaaatgttctttttttgagatggagttttggagttctgctcttgtcgcccaggctagagtgcagtggcagctcactgcaacctccacctcccaggttcaagtgattctcctgcctcagcctcccaagtagctgggattacaggcatgtaccaccacgcccagctaatttttgtattttttagtagagatggggtttcaccatgttgtccaggctggtctcaaactcctgacttttggtgattcacccacttcggcctcccaaagtgctgggattacaagtgtgagccaccgtgcctggccaacaaatgttcttaatggtacctagaatggtgaagccttcccagaagattttcaatttaatttgcccagatctatcagaggaataactgtctatggtagctatatagccttccaaaagacttgaaagtagaaattactccttgatccctgggctgcagaatgaatgttgtgttatcagacatgtagacaacattcatctccttgcccatcttcgtcagagctattgggtgaccaggtacattgtcaatgagcagtaatattttgaaaggaatctttctttctgagcagtaggtctcaacagcaggcttaaaatattcagtaagccatgctgtattcagcagtactatcatcccagctttgttccatttatagagcacaggcagagttgatttagcataattcttaagggtcccacaatttttatgatggtagatgtgtattggcttcaacttaaaatcaccagcctcatcagcacctaacagagtcagcatgtcctatgaaactttgaagctaagcattgaattatctcctttctagctatgaaagtgtgtgggggtctgacccacagaccctaactcagtgatggatgagagacatacgctgacatagatattttgcctgtcagtttggctgagggtccaggccactcacagacaccgaggaaggtgctgtaaagaaggtgctgtaaagagtcgtggccctgaacagtcagcgaagcttgcatttattcagtatagattaaatgacaaaggtcttgagtaaacaacactagagggtaattgacattgctgatttcccaagtagagagcaattatgcacctgaggttgatcaaaggttggtcttaggaccacatgagtaaacaagccatttagataaaataatctacattcctttgtatctgtgccccaagctattaactcaagttaaggattaggctgcttttagccataaccctatcctgaaacttttgcaaaaccttccagccttccaaggtttgtgtctctattctataacttcatcttaaaatttttcccaccagcctgactgaactcccacatctcccccttttctgttttttgcattgggttctgttgactgaagcatacagctgtgtgcagcaacaggtctgtcgggcaaggcggtcattgctgttattctgactttgcatcctagaattagcaaataacataagacaatcatgagtataattagcaacattcttttccaatcaaggagtgacctgcagcattacttggcacttcagtttgatgtgtgctgttactaaggaaccccgctgggggtatgttaaccccttccagccaagcagtcatgttgttagaagcggggaagggagtgtctgcccagataacagggcagattttcagataaatctgaaaaaaggcagatttagaagataagcttaatagagtgtagcaggtacaggtagcaggtaaagtgagagaatttaaaaagattaataaaacatagtaaggaacaattatctggagtgaatggtgtctgtgtccagagcaggattcgctcagtcttctgacttgtcttcttcagcattctgtccagggcctgtgttgtccaaggaaggtgcattgtctggggctgtgggtcctgtagggttattttcttcatttctggtaccgggttaggtcctagccatgccatgctatggtttgatgcgttgtgctagaatccaaagaggacccgagggggtgtggaagcataccttcttccccatgttaataattcatttggaccacaccatacattactgttcacatctttccataaaactgcaggttttatgtcttgagaggttttagcaaagtgcatatctacagctgatcgaaatgtgtcatctaaattttaaaaattaagggtaaataaggtttgtgccaatagtgttgccgggtctttacccatattcccccctttttgttttttgagcatatttttaagagttgaacgggcatgttttactatggcttgtccttgggggttatacgggatgcctgtggaatgttggatattccacatgtgacaaaattgttggaattgtgaattggcataagctgaaccattatcagttttaatttttgtgggccatcatataaatgcaaaagttaaaagaagatgtataggctgggcacggtggctcacacctgtaatcccagcactttgggaggctgaggtgggcagatcacaaggtcaggagatcaagaccattctggttaacacggtgaaaccccgtctctactaaaaatacaaaaaaaaaaaaaaaaaattggccaggcacggtggcaggcacaagtagtcccagctactctggaggctgagtcaggagaatggcgtgaacccgggaggcagagcttgtggtgagccagggtctcgccactgcactccagcccgggcaacagagcaagactccatctcaaaaaaaaaaaaaaaaaaaaaaaggtgtttaatgacatatcgagtggactctcaaggaagagcatgtgcactaattagatgagtgttggtatcaatggctaaatgtacacatcttagttttccaaattcagggatgtaacatctgtttgccataactaattaggttctaatcctctagggttaacacctgttgaaggaggggacgtgcctgtgagctggcaatctgggcattgtaggataatttgtttagccagtctctgggtaagttgaaattgtttagataagtttctccagtgttggtggaaaaattgatgcaattgcatggcttagtcaagcagtgatatcataacctgaaggtctgcttgattattgccataagccaatgggccaggcagtgagctgtgggcttgactgtgtgtaataaaaacaggatgtgtacgttgatctagcaattgctgaagttgaagaaaaagagcacacagggtgggctccagagtggacttaattagggctctctcaaggttctgaaataaatcaacagagtaagcagaatcactaactatattgatgggctaagtggaaaaattctccacagccagtatcagtgccccattctcagttctctgagtgctagtaagcccagatagagtgatggaattatgtggtctccaccaaactgctgcttttccaaatttacctgaaccatcagtaaacagtgttaaagcattaggtatgggagagtgaactatttttgtaggcaagatcccaggagtacgagataagaaatgaaggagtttatcagcaggaaggacatgcgctatttgtcctgtataatcagagagagctatttgcagatcaatagatgctggcaatactgctttgaattgctttttacttaaaggaatcctgaaaatatcaggatcataacctagcaactgacaacattgtctgcaacctgaatggatgactttactaagtaactggatatagggagagagtgttttagtcccggtatgtgagcaaaaaaaaaaaacccattctagaaagcacagtgctggggggtcatctgtcctactaaccctccaggggagtgtttggtgggaaaaataaataactggatggaataatgggtgtctgtgcaatctagttgcctctgagaggtggcttgttctattttctcaatttccctttttgctgcgggggttaactctctgggagaatccaggactgtattgccctttaagatagacaacaggttttgcagcttataagtcggaatgcctaaagtggggcagagccagttgatatgcctggtaatttctgataatatttaaagtgtgtaagttgctagtatttaaccttttgaggtcttactgaccgggacgttagtatgtacccaagatatttccaaagagaggacatttgtgctttttcaggtgcaataattaaaccttttagctgtattctttatgacagaggtatgtcgatttaaaagcattagttctgttggggctgctagtaaaatatcatccataaaatgaataaccttacaatcaggaaattcttttctactggggagcaaagcttgatttacatgatactgacacatggtaggactgtttagcattccttgaggaagcactttccaatgaaatcgacaagctggcctttcattattgtaaacgcaaatttttttctgtcctgttctgctaggggaatcatataaaaacagtcttttaagtcaataacaattataggccaattgtgaggaatcaccacgggggaagggagcccctgctgaaggggtttcataggttgcaaattggcattaatagcatgtaagtcatgcaaaagtctccatttaccagactttttgggaatgacaaaaatgggcgaattccaaggactatttgatggttctacatgtccagcttttaattgctctttatctaattcatgggctttctgtaatttctctcccttcaaaggcaactgttctacccaaatcagatcttgaaagagccacgtcaggggtaggagagagataacggtggccattatcagaaagaggttttttaaatttttaaattttactcaaatcttagcatagaattacaatctgggatgtcgcttgtacataaggagcacacaaaattttgccacaggccggagagctggagagctgagcaggcaggccccagggcggcagccactttgcacctgcttaggcgctgtgctttgtctgtgctgcttctttctgtactgctccttcctccaccccgctgcctggcggctgctgcctgctgcacaaaccttcctgcatgtgcctcctgcccatccccagcaggctagcttctgcatgctgggcctggctcctcattgcgttgctactatgcaggtcgagttcctgggagcatctgttggctccaggtctgcaagcctccctgctgctgagcctttccttctgcccaccgctcgcatggtcgcgcagctctggtctttaatgttttttcgtatttttaaataagcgttaaaagaaatgggtttatacatctgattgccttgttgatcttgcattactgggcaggcaaagagctccccttttaatgctgcttgcttaagacagggtctcttcgctgtagcatatcccctgtcctttttcctatctactggaggagggggcttaggcaaaacctccgtttccccttttttattttggcctggtgatatcggggctgagggaagaggaggtggtaaagcaggtgatggttcttcctccttctcctttttaggctcttctgtgtataatggagccagggctgccctaactaaggcccatagcattaaagatgatactgggaccttgcccttgcatgcaatgtttaagatttctccccacttgttccagagctttacgtctagcatgccttcttcagggaaccatgggttttgggatacaacagtttgcattaggtcccttaattgagcctgccaaacataggctccactagctttaagcagctgtttcaatacttctatatactgtttctgttaagctgataactgttgtcctgtgatgaaaccctagcctgaataatcccctgtgaacttggaaatcctgagcaggcaccaatgacttactgactgtgcagttcctttttcaccttcattttcggggggtccatcgtgatccttttgtagcgttcctcatgcagggcgccacttgtgggggtctgtcctacagacctcagctgcatgacggatgagacaggtactcagacactgatactcagtgaaagagcaggccagggggcggccggcaccagcagccgaagagagttttgcagctcctccaagctggcaatgcttgtatttagttagtacagatttaattgacaaaggctttgagtcaaccactgtgggtaattaacctggctgcccccaccctggagagggccatcctgcccacaaatgatcaaaggttggtcttaggaccacatgagtaaacaagctatttagataaaatactttacattcctttgtatctgcgtcccaagctactaactcaaggtaaggattaggctgcttttagccataaccctatcctgaaacttttgcaaaaccttccggccttccaagaaggtttgtgtgtatatcctataacttcatcttaaaatttttcccacgagcctgactgaactcccacaaaagtcctagatggcatcttcttctaatagaaggttgttttgtctacattgaaaatctgttgtttagtgtatccagcttcatcgatgatcccagctaggtctcctggataactactgcagcttctctatcatcactttctgcttcacctggcacttctatgttacagaacggtttcgtaccttaaacttcatgaaccaacctcagctagcttccaatgtctcttttgcaactttttcacctctctcagccttcacagagtataagagggtaagggcctcgctctgagttagactttggcttacgggaatattgtggttttcacgcacatccgtatgaaaagaccaccaaacaggctttgtgtgagcaataaaagcttttaatcacctggatgcaggcaggctgagtccaaaaagagagtcagcaaagggagataggggtggggccattttataagatttgggtaggtaaaggaaaattacagtcaaagggggattgttccctggcgggcaggagtgggggtcacaaggtgctcagtgggggtgattttgagccagaatgagccaggaaaaggactttcacaaggtaatgccatcacttaaggcaaggaccggccattttcacttcttttgtggtgtaatgtcatcagttaaggcaaggaccggccattttcacttcttttgcggtggaatgtcatcagttaaggcaaggaccagccattgacacttcctttgtggtggaatgtcatcagttaaggcggggcaggacattttcacttcttttgtgattcttcagttacttcaggccatctgggcgtatacctgcaagtcacaggggatgcgatggcttggcttgggctcagaggcctgacagtggttagatctatctagaccgctcaaactttctcatgtcagcaagaaggctgttttgctttcttaacatttgtgtattcactggagtggcacttttaattttcttcaagaacttttcctttgtattcacaacttggcaaactgtttggcttatcttggctttctacatgcctttctcactgaggttcatcattaagagcttttgatttaaactgagagatgcagtggggcatggtagctcatgccagtaatcccaggactttgggaggccgaggcgggcagatcacctgaggtcaggagttcaagaccagcctgtccaacatggtaaaaccccatctctactaaaaatacaaaaattagctggatgtagtgttgggtgcctgtaatcccagctactcaggagattgaggcaggagacttgcttgaacctgggaggcagaggttgcagtgagccaagattgcaccactgcagtccagcctgggcgacagagtgagactccatctcaaagatgaacaacaaacaacccacaaaactgagagatgtaccactcttcctttaacttgaaacttagagaccaatggtaggtttatcaactgtcctgatttcaatgttgttgtcttaggaaataggcggcccaaggagagagagacaggggaacagctggtctacagagcagtcagaacacatgcaacatttatggattaagttctccaacttagacgggtgcaggttgtgctgttgccatagtaacatcaaagataactgatcacagatcaccataacagatatagtactaatgaaaatgtttgaaatattgtgagaattaccaaaatgtggcatggaaacatgaagtgagcacatgctgttggactaatggagccaatagacttgtttgaggcagagttgccacagaccttcaatttgtaaaaaatgcaataaggcacagtgcacgaacacaaggtatgcctgtatgttcctcacctcgcgtcaggtgctcccctagaattcctggctgcagggagtcctgtgggaagacggagaacaccaccgcaggctttccacacaggggtctggatttgtctgtgaaattcaggagctcctaaaaacaccacgaaggaaatgaaaagtaccgtgctgacaaagcaaacagaagactaaccagcgtgtgaagccgaaagaaaagagcacagcggtcttcaacccacagggctctggaggcgggatgctgaaataggagaagccaggaaggaaaatgtgaaaaccatgtttttagaaaaagtcacatttatacttttcaaacgaatcctcttaaatgaactattagcctgaagttgaaggtgggttcaataggtttattggtcacaagaatctggcatctctggggaggactgttgttcaaattgtgcattttagcataattagaacaaacaggaatagccctatttaaacttcatcagtgtgtattttaatcttggtctgtctttattgtgaaagaattaaaaggtttctatgaaaacaggccatctcttggggcacaggttgatagggttagatgaaaacaggccatctcttggggtacaggagcacaggggtggtatgatgctggtgatcaagtcagatagtgaccctgtagcttagcaacctccccagaccttctcctgtaacttggacagggagaacaaactgaccagccagcccaagatctgcttgttatctggaatcactgatgcatctaatctcggaactagaaattatatcagagaataaccagcatagtattttccaaggtgtgtgttatgaaatgctgtttcagtgagatcgttatggtcattacctgagaaagggaggctgcactgcctaagacagagaccctatgggtttaatttaaatgggtttcttcgtcatggaatttctcagagcctgtgtatgctaatgtgaagccagccctggtgctaaatgagtggtgtcagctataagtattctgggacttgggaggaggaaaatctctgcagaccaacaagtgagggtcacagagagaagatggaatttgagctgcaccttaaatgatgagtgagcggggtgagctcacctgtgcaggcatgctgaagaaagaaagagatcctgcttattagctgggtgtggtggtgtgtgcctataatcttagctacttgagaagttgaggcaggaggatctcttgagcccaggaggtcaaggcttcaggaagccatgattacaccactgcacaccagcctgggtgacagagcaagactctgtctcaaatacatatatgtatgtgtgtgtgtgtgtgtgtgtgtgtgtgtgtgtgtataaatatatatataaaaatatatataaatatatataaataaatatatataaatatataaatatatataaatatataaatatatataaatatataaatatatataaatatataaatatatataaatatataaatatataaatatatataaatatataaatatatataaatatataaatataaatatatataaatatatataaatataaatatatataaatatatataaatataaatatatataaatatatataaaacatcgatttccataaaagatggatgaagaaattgtggcatgtccatacaattgcaaactacttaccaatgaaaaaagacaaggtgttgatggatgaatctcaaataagttatgttgaatagagtgggaaaaaaagaaaagtattctaagtagaaggaacagagtgaacaaagatacagagtcagaaagaagcatggggtgttggaagatctgtgagcagcttcttgcaggagcaaagcatcccagttgtaaagccttagaacatagaactggaaaaggcaagaataagcttgggaccaatgcagatgcccagggtaggatgtggagtcagacctacaggccaagggggaactaccgaagacctgtaatcagagccaggacctgacagcactggaacaaagctagagaaagtgcccaggtgagcagtggggaaagcggggagcgggctgatggccatgattaaggagggagtggcagggctgaattatgagggtgtgaaggttaatttaatgagtcaacttggctgggctccggtgcccagttatttggtcaatcatgagtctagatgttgttggggaggtattttctagatgtgattcacattgacatcagtaggttttgagtaaagtaggctctgctccatattgtgtgtaggcttcatccaatcaattgaagtggagtttcccaaacaagagtggggtttcccaaagaagaaggaattctcctcaagactgcaacatgtagaaaccctgccttagtttccaccctgcctgctctgccctgcagatattgaacttacagcccccacaatcatatgtgccaattccttaagataaatctcataaatctctctttctctgcatggatctgcttatatgcactttttttcaataaaaattacactgaatatgcctgcttctccttcctccacctcttctacctctgccattcctgaggcaggaatgccaacccatcctcttcctcctcctcctgagcttattcaatgtgaagacaatgaggatgaagatctttatgatgatccacttccacttaatgaatagtaaatatattttcccttatgattttcttaataacattctcttttctctagcttactttattataagctagagaaatatctaatacacagtacatgcaaaatatgtgttaattgactattctggtcaacagtaggctattagtagttaagtttctggggagcccaaagctatacacagatttttgactgtataaggatcagtgcctctaaccctcacatcattcaaggatccactgtacatatgtattcatatcctgttggttctgcttctctggagaaccctgactaatacagatgatgactatgagatctggaagtaacatgacatggaaaagacctggcaagagctgcatcatagtgactgatgggctgtaagaactcagccagagggagtaggcggcagcactttccgcctctggtgctgggccaactgagagaagagccatattgtcaacagaaacaaaggatgtcaggaagaaggggtagttctgaggttcagtggacagctggagaaacagcaaagagattgactgatatggatacttttaatctaatagctcaagcacttgagtagtgatagttctttgctgaacctaaagctactgatttcatcatagctgctatttctgacaataactatttcatgggacgccgatgagagtcacactccctctgcctcgccaagcccagtcatttctttcaggtcttcctgcagttgaggtcatagcctgacattaacaaggagaaagggtgctagtgcttaaagcacctttgattttctcctcttgtccctttttctttcaattaaaagaacaaaggactgaggaagtttcaaagacccagtgtatgtggcagtgggcaggaggaggtcactgttgtatagtccatctgccatccctgctcagtgctggtactgagctgatatttttctcaggatttacgagttttgaaagatatgttttacctcctaggaaagtatttcattggtaatgcaggtaactggataccagaaccaaaatgaaaatggagcaaagtaaaaagcaattcaacttcaaatacaacagagaataattaatattccttaggaaacatgaaatgagggaaaacaaatgattaattctctctgtgttgatatagaaggttacctgggctgtttagaaaggtcatttttgtttgcatgtgcatcttaaaacaaatgaggggtggaagtctcttatcttttacaaaatatatggattagcagactgcattttgaataacaaaatcatgcgtattttctacaatttttaaagggacaatttggcaagtgttattcaaaagaagcataaatagaaaatcctcttttttactctcccaaaaccattttattgtctgtggcagtctcaaattatataattacttgaagaaataagagcatcacttaacctctcctatttgtgtttcctaacatgaggttttcatcaggaggtcattcccaagtgaaacttatttacttctgaagttttcctggatttgtccctccaacccctgcttcctgaatatgttctaaatggcatgatagtctgagacttgcttatatgacatgtctcaaaatctctatcccggtcacagcttttttcatagatacagtccattccattaaagttcctcttaaagccccccaaattcaaatatgatacttaataagcagcctgcccattgtggactttggctttcagtaacatacgcactatacatctgaaaacagaagctaaatctagatttgctgttttgccagccttattcttttttttggctgttactaagctctttgtttggcagtataacatagtggttgcagtcagatagaaccgaaattgattttttccctactccttaatcgttatatgacccagggcaagttatttcacatccctaaattccattcgctcatctctacaactgagctaataataccgaccccctgcaattgttaggggggccaaatgggaggctaaaacagacctagtgccatcactgcagcatggttactgctcagtaaattatagccatttgagttgatgactaggaaaccttcttcctttcttagtgagttgtttaggtcactagatcaggggaatgccagaggcactactgcttatttattgtccatggcaaagatttcataaatctccctaagtttgtccacaaacatatgacctggtcagcagtacagcaaggtgggcagcaacgccttggttactgtcccggtcaaggggcatggactagtggccgtatcccttgaaggaaggtcttgaatgctatagagctttattctacatctaaaccttgctgctcaaggttattatcaatggtaatacctggaaggcaattgactaaatgtataaatggaataaatctggaagatagtgcctaaaatttttttttttttttgagacaagagtctcgctctgtcgcccagactggagtgcagtggcatgatctcagctcactgcaagcttcgcctcctgggttcacgccattcacctgcctcagcctcctgagtagctgggactacaggcgcccgccaccacacctaagtttttttttttttctgtatttttagtagagatggggtttcaccatgttggccaggatgtccttgatctcctgacctcatgacccacctgcctcagcctcccaaagtgctgggattacaggcgtgagccaccgcaaccggcctaagactttgtattttagaaagaagacttaaagagatttcatgagttaaacagacctatgattgcaaaaataaactgaatggaagtgtgaaaataaatgaagaccacttacgggagaataagtaaaggcaattgtgttagttaatttgtgcgttgctttaaaggacccaagactgggtaatttataaagaaaagaggtttaattggctcacattttggcaggctgtataggaagcgtggtgctggcatctgcttctggtgaggttctcagggagcttacaatccaggcagaaggtgaaggggaagcaggcacatcagtggcaagagagggagcaaggtggaggaagtgctgcactcttttaaacaatcagatctcgcatgaactgaaaactcagtcttcaccgaggggatagtgctaagccgctcatgagggatccacctccaggaccctaacacctcccacgaggcccctcctccaacactggggattacatttcaacatgagatctggagggaacaaacacccagattacatcagctatatatccagagcttgctctagcaaggcagtcagctgctgttgcttgagtttggcagagactcacaggcagggacaggaatgggaaagcttcatggcggaaaaaagggaaggaaggtttcaggtgcgccctcattggaggctgtgggatggggaagccgtaggtgggctaaccagaagtgaggaatcctatgtgattggttatgggagcatatttggctttctctaattagtcctaaattggaagcgggtcataggtggcgggggcgggtaggcaaagatgaagcaagctggccatcgttaatcaagtcctgctcatttgggaccagttgctgtaagggtggttgtttggctttctggaatcattgctgcagatagttggttggctttctgagctagttgctgcaagttgtgggtcaaagttctgtttttatatacgatccagctaattttccatttgtatattcggtctctcgggtaaacaaagaccccctctcacacctggcatccccgcctgcatccccacaggctggtttcagaatctctgcttggtgtcggaggcctgtattaagagccaggatagggtgtcacctgactgcgggttaattacatgaaatccccacagctaattcagtgcctcacatttactagatgctttaaaaatttttattaaatgaatgcatgaatgcacaaagtagagtgtgttcagtagccatataaatcttaaagatgtatcataaaactggaatcaaataatggaaattacaggagaaaggatttacatcagtgtaagcaagaattttctgaccctaaagctgtccagtgatggacagccatccagcctctctcgagttagctccctgtcacaggcatgggctggatggtcccttcccagggattcagtggaggaacagttttagggctgaaagtggtctggcatgacaaggctgtatgtttgagggcaggaaagatggcaagagttaaagtagctgtggtttcttcatcaaagcttacacattgtaagctcaataaatgtgagctaacatcatcatcaccatgattattattattagtaaccctcagcacatgtcagggaggaatgaggacccctctacttccccacttagggaccacacacccaaggacctggccacacaccatattttttgtttgtttgtttgttttgtttttgtttttgttttttggatacagagtcttactctgtcacccaggctggagtgcaatggcaccatctcagctcactgaacctccacctgctgggttcgagtgattctcctgcctcagcctcctgagtacctgggattacaggtgtgtgctacatgcctggctaatttttgtatttttagtagagatggggtttcaccatgttggccaggctggtcttgaactcctgacatcaaatgatccacctgccttggcctcccaaagtgctgggattacaggcgtgagccactgcgcctggccacacacacactttttatgttgggcatagtgatagaccagtgagctcccacaaaatctggcctccatcaatttggtaccatttctgacattgtcttcaaaatggtggagaatttactacttatgaaaataatgtaacaaaataccactttaaaccatggaagttttcaaaataatattgaggtaaaattctaattggcaaaacttgttgcatacatatacagattttgttattaaaattattaaaaattattaaatttttattattaaaaatgtttcactgctattcaggaggctgaggtaagaggatcacttgaacccggaagtttaaggccgcagtgggttttgatggcaccatggcactctagcctgggtgacagagtgagaccccatctaaataaataaataaatgatacacaaataaataaaatgtttcactggatccctctgagtctccatcagacctaggaaatgcatttattttaacaactatattaacaaagattcacttagctgattttattgccctgtttttgttacttcttggctttcatatttttaattggaaaaaattggaatgtatgtcttacaatgacttgcaggaatattacttttatgcccataaatcattctgcatatgtcaagtgttgcagctcaagcatctattattgtaattagctgtcacttcagtcctttattgttgaattcaccaacaccaattctgtcatatttttaaaaacctcttctggagctttaattccctccgcaaactgtatatggaaatttagccccattgcttgccccgttttaacatggccttcttaacccccacccaccaactgctaaattatttctatgttgtttagtcaaagttaaatgtaccacatttggactgcaagaactgcctgaaaatactcatccacttctgaattgcctgaggtgttagatacatttgttctagaactggtggctctgaattcatcctcagaagcctgtgggagaaatcatatttcataataaagcaagattaagataaccaaacacacgcataacatgttaataaactcataatttttagtaagagctttgtattttttagaaattttccatgaagcctgattcatttaatcttcacttgcacccctgcgtgagatgcaggacaggcttcagaagcctcatttcacagatcaggagactgtctccaagaggctaattgaagaatgtcctggaattattccatcagttaacaccacagttaggacttgtactcaaacttcgggtttatgcaacactttttttttttttgcctgtgccacactgtttctcgtacttaataattggctgaatcagtgatacagatgtatagtaacatcccacatatacagcagtaccccagaaatctagagcttccatagctgagagccttctttaactggaattcaaccaagaaccaaaaagtatgcagaaagacctagcacatccaagacgtctcaaagctactgccttttactcatcggagcagactcctagggccttattcaagatctttttagtcttagactcaccacaggttgaattaatttccaagctcatggctgataagaagtcacaagtcagagagaaaaacatgcccagacaagtgagagctgtccacaaggcaggaataaacacactgaccattgaaatcaacgcaggcattttggaattcaggtattcctgtaccaacaagtataagccagcccctcgtgcctcgcagcaagctccagaggcccccggccttcagcatgactatggctttccctttaggaaaaaggaaaagtccatttactcactgcttccaattcaggacaaaagaaatgtgcttaaacattttagagaatggttcatcaaaacggcctaaaggtttcctctgcagagcagtaaactcttagctctgggcaatttgcatctctaaggcagcactcaagcagtattcataatagccagaatatggaatctgcttaagtgtccatcagtgaaggactggataaagaaaatgtggtgtatttatacgtgatgaaatactattcatctgtgaaaaaaaagaatgaaatcatgtcttttgcagcaacatggatggagccagaagccattatcttaagtgaaacaactcagacacagatagacaaacaccgcatgttctcactcataagtgggaggcaaataatgtgtacacatggaggcggagtgtggaatgatggacagtggggacttcgaggggtgggaggtggatagtgggtagttgtttggtgggtacattgcatgttccttcagtggatacactgaaggccgtgatttcaccacagtgcaataaatcagtgtagcaaaattgtacttgtactggctgggcaccatggctcacccctgtaatcccagacctttgggaggccgaggcaggcagatcacttgaggccaggagttcaagaacagcctggccaacattgtgaaacaccatctcttctaaaaatacaaaaattagctgggcgtggtggcgggcgcctgtaatcccagctactcaagaggctgaggcagaagaatcacttgaacctgggaggcagagattgcagtgagccaagattgcgccactgcactccagcctaggtgacagagcaagattctgtctcaaaaaccccataaatatatacaaattttaaaaataataacatttaaaaaaataaagcagtgctgtctgataggaatatgcccaggccatgaatgtgagccacatatataatctaaaattttccaaccgccacataaaattgcaaaaagaaacagggaaaattaattttcacaatattttctgtaatttagtatatcctgaataccattttaacatatcatcaatacaaaacaataatgaggcagggcacagtggctcatgcctataatcccaacactttgggaagctgaggcgggcagatcacctgagatcgggagtccgagaccagcctgaccaacatggagaaaccccgtctgtactaaaaatacaaaattagctgggcgtggtggcacatgcctgtaatcccagctactcaggaggctgtggcaggagaatcgcttgaacccgggaggtggaggttgcggtgagctgagactgcgccactgcactccagcctgggcaacgagtgaaactccatctcaaaataataataataatgagatattttactttttttttttttttttttttttgctaaggacttttcagaatccagtggtaacttgacacccacagcacatctcagtttagacatgccaacatttcaaggactcagtagtgacctgtgactagtggcagtcttgttagcacaggtctggggagagtccctctctctctaattagaaagcagaatattttttgttttgttctaatttaatacacaaacccaaagagctaaagtttttactctgatcagcactttttatagcaaataaaaaaaaacaatttcagttggaaggactggtcactggggagttgcttctaccgcagaagtcacgttgtctctggttctgcaagagtttcaggactttgaaagctgcaaaagcatttcgtgccatttaacacacactactgatgtaaattgcttatttttacttccaaatttaaagactagactctgccttcttataaaatgatcctgatgttattctcagaagtcaaacacttataatctttatctgccaagagatttccgcagggaacatctctaaaatacacttggcctgccgcaaactagtgtcatttccctgctacaagtatcatttccctattatttccattggttcatttattcattcattcattcattcattcattcattcagcaaggatttgtttagtctctgctctgtaccaggctccactggcagcagtagggctacagtgaggccgagggtgttttccttcaagagctcacattatactaagaacataagcaggtaaagagtatatatagaatacaatttaataagtgtgtaattacctgtaatcccagcactttgggagaccgaggtgggcagatcacatgaggtcaggagttcgagaccagcctggccaacatggcgaaaccccgtctttgcaaaaatacaaaaattagccgggcataatggcaggtacctgtaatcccagatacttgggaggctgaggcgggagaattgcttgaacccgagaggcggaggttgcagtgagctgagatcgcatcattgcattccagcctgggggacagagcaaggctccgtctcagaaaaaaaaaaaaaaaaagtgtgcaattaattcagatcaggggaaagtcacaagtggtctcttagaggaggtgatatctgagctgaagctggaaggattcatggagaggaactggttggagaaaggggagaaaggttttcctttgcacagaggtgaagtggtttgtggttcagagaaaaggcagtcagtcacctgtgtggctggaacatacaatgccaactatgagtggagacagaagacagagacattgtggggcttgggtgtcatgcagagaagcatggacttagccttcaagttcatggaaaacctttgaaaggttttagtcagaaaggagacagctgtcaggaaatggattggaaaaggctgagactggaataagggaaccatttaggaagtcctgcagaaataggtcagggtgagggtgagttcttgaactaagtccagtggcagtaaggaaggggaggaaggcagggtccctcctgggctggctgagctgccccaggctggctcattacctggcctcggcctgggttcctcgttgtcccgtatcctctgaaagaagcccaagactgagtcaaggggtgagcatcagcccgcatgcctcctacttgagagggggcatttactcaggaggctgaggtgggagggtcacttgagcccaggagttcgagtccagcctgggaaaagtgtgagtccctgtctctaaaaaataataataatacttgaaggggtatacatcatcccatttctgtaaacaaagaaagtccccaaatatgtaggagcacacagatgtgcgtgtatacagatgtgggtggaaaagagtctggaaagatacacaccaaacacagtgtgttcacagtgatcacctgtggaagagggagcagagttagggcaaaggagggcttcctatttctattctagaggcatcacattgcttaaatgtatttctttgttagtgtacagtgtgcacatatatttaaatatagctatatttgaagagtcacttaattgtaatcaatatattgtgaatagcagaagcatttagtatatatgtgtgtgtacatgtatatgtacatgtgtatgcatttatatatgtgtgtatatacattttgtgtgtgtgtgtaagacaccatgatagaactatacttgcaatgagaaatatttagggcctgatcatgtagatagagggcccatcatcaaatacctttctgatgtcttgagcccctaaatagtaagtgccacagtaatgccgatccgagcctgcacctgcagggtatcggttgtaaaatggagttgggatgattccaccttccccacagggcactactcccgacccaccataatgtaccgacagcgcgtgagggcaagattccacaggaattcctgcatactttcaccatgtgtaaacacagacactacattttcagttttgttaatgaaaattcaaaggttttatttaccttctagctgttgtttttaaatatgaaagtcaaattcattttaattcacttgcatctgtctaggtaacatttttgccttttaccaatcctcaccccaaaccaaaccaatatcgacaaaaatagttcagatcattttcacaacctatagtatcttattctccacctcaaagcctgcctggttctcatttaatttatttccgtccatcccccttacataagacaaatgttcatgacccctcttctcttcagcccctcacctcggtcacttggatttcaatcatctttgagtttacatgagttaactcttacctttgaatccttatttatccatttctaaacttaaatccttgaacaaagggtaggatttacaagatgataactcttcctccctttatttcacattcatgatctcagaggcatttttcttggagagagagatgaaggcagattttcctgaattcctgttactgccctatggggtagaggtccccagatgcaagcctccctgaaatgtagagagacacacagccatggcagtggccgaggagctggcctttgatcctgctctcactctgaaattgcctgccagacactgcatccaaaacagatggaaaatgccatgtttaaggcagccttaagtgtttttattttcaagttatttttagtcagtattgtcaggctctctgtgtcacttggcatttacatctagccctaagagaaaaagcgagattgttaaagagaagaatgtttcatcagttaaaatataagcatcaaagtagaagaaacaaaagagcaggtaggtaaggtcttgggacattttctgagggaaagagatgcattttggggagctctgctctctttaccctctgagacaagaaaccccacatagacttctcagaggtggtaaaggacagcagcaaaagcgctccagatgcggaactctccaggacagtgtcctgtaccacggccagcccctgcaggacatttaggtgacggcggctcgcttctgcctaaaaagcatattgctgagtttctctttttgttagaaaagtctttctcaacattgatcccaaatctgcctccaacccttccattgttgatccaagttctagaacacagatactttttttccttgttatctctgttttttatttttatttttaatttccataggtttttggggaacaggtggtgtttggttacatgagtaaattctttagtgatgattcgtgagattttgctgcacccatctcccgagcagtatacactgaacccaatttgtagtctcttatcccttacccgcttccctccctttcctcctgagtccccaaattctattgtcattgttatgcctttgcatcctcatagtttggctcccacttatgagtgagaatgcctgatgtttggttttccattcctgagttacttcacttagaataataatctccagtcccatccagtttgctgtgaatggcattaattcattcttttttatggctgagtagtattctatcatagataggtagatagatagatagatagatagatagatagatagatagatagatagatagatagatacatagatagatagatagatagatagatagatagatagatagatagatagatatagagatagctcacagtttatccacttgttgattgatgggcattgaagggttggttccacgattttgcaattgtgaatggtgctgctgtaaacatgtatgtgtgagtatctttttcgtacagtgacttcttttcctctgggtagatacccagcagtgcagttgctggatcaaatggcagttctacttttagttctttaaggaatctccacactgttttccatagtggttgtactagtttacattcccaccagcaatgtagaggtattccctagaacacacatacttataggccctagcaaaataatggcaatagatacctaaaaacttgtgagtatctgatgcccatcccatcagaaaacagaaatatgagaagcctgatgtctgggacgaggcattcccagggcaaccttttgggttggtgacaccagacaggtaggggagcttgcgtttccccctgttcctgccatacctagaatgcccatggggacagtggccttatacctccaaggccagaactcactgcggatgggtcaaggagctatttttggttaaatattcaagagatgtattttgttttttctaagtagctccacagcttgttagccccttggaagataaaatgtaggtgaaatagttttacagcatgtattctgacagtgaagactttggaaggataatcatccctgtcaattgtctccacttagtttataaaacatttacttttgcattaatttatctgatcctcccatagcccttgaaggaaacaggggccattatgactcctggggtcacagatttggggctgagatccaggaacactgaatggccagcccaaggacatgtgctaagatgtggctaaaccaaggcaactgctccagtctatggagaatgaacctgatattcctcacacagatgacaccctaatgaatggccctgagaataatgacctgttgttctgatgatcaaacatggtctacaaggagtgaacaacaagacaaatgcctccttttgtctcaatgccagaagtagtcaaactgtgaagtagcagcccccagctgtgtgcccttggcaaggggaacccctccgtggagaagtctctctgtgcatggccaccctcctccacgggactttattgcactctctgaagccaccctaaatcttcaccttttctctcaccactccaagaacccggccaaagaaaatcctccctgaattctcagtctctccctaaacaatgtgatattttatgagaatttccagaaaagagaagcagtgaaaaatttttacttttctctacgttatcttcagtgacttactcattttatctatagcatgccagacattggagagcaaactagaccaataataaaatatagctcctgccttgagtgaacttacagtattaagggagagtcaggctacaagaaaaacaaggaaataaaataagtccagtgacagatggactaaatagaatagaataaacagggtgttgtgataaaggaggtagggatcaatttcaactgcagtggttggagatctctctgaggatgtggtactgggacctaaacatgacaaggctcagttatgagagaagaggggtattggggtgggggcagagagagaattccaagaagaatacgtggcttgcagaaggcccggagagcttttccagcatggcttaccccagaaaacaccaatgttactaagaccaatacagtaggccgaaggggcaggaagagagaccccaagcattccctcttctaaattattttacctccttgcaattgtgtggtctgcatcccacccgcttcttcctgcccgagaacttcaacatcttcagtacttcaggaaacccacctaatcatgttttctcttccgctaactcttctgtccgtgttacatgatctagagttaaaactaccatcctttctcatttgtctagtttcttaggaaccttttcctacttttttgaggaaaagtgttttggaggaaaatgttttttttcccaaacatgctgtgataagacacagcagggatttattttatttttctccctgaagccatccttcttggagcttttattggaagtgcaatgaagggtttaaattagagttaagaaatatctaagcacagaggtaaggtcactctggcctctatatgcagaaggggacaagaaggggaatgaggggtgaccagaaaggagactctcgccagcatggtgacaagtggatgtgagaaaagaggaggggtttgcaacctacctttcaggcagcctctgaaggacctactgaaactgcatgcttgggctggagaaacagaaacatgggcagccgtgcaggatggttggtggtgtcccaaatgaggcaagtggctgatggggacatggtcagatattttaattagaaggatacctacaagaaatttaagaggcaacgtcaactaggcagttatatacacaggcttgaagctcagaggtgagacctctgttagcttataaatctgagacttattcagggaggtagacagctgcctaaccctagcacagccatactggttacgcatctgctgtctgcctgtttggcagtgcccaagccagtcagttgtttctgggaaggtgctggagagagtgagtctttcttttctgtctcactctttcttctttctttcaccactggctctatcacccaagacctcacaaccaccctcctatttcgccccagtctgtaccccctccttccctcctcattctctctgtacctctgtttccctctcagttactctttctccctcttctttcttgaagtcctgtctgcattttctcctgtctgttgattttggttacattcttacgtctagcattctatctgtcctaatctgccttccaccttttctcacttcttttccttctactcatatctgggtttgttcctttttctgcagagttttttcctctttccttcgtttttctttcttttttctcgagacagcttcttgctccattgcccaggctggagtgcagtggcgcagtcttggctcactgcaacttccccgtcctgggttcaagcgattttcctgcctcagcctcccgagtagctgggattacaggcatgcaccaccacacctggctaacttttgtgtttatagtagagatggggtttcaccatgttggccaggctagtctcaaactcctgacctcaagtgatccacctgccatggccttctaaaatgctgggattataggcatgagccaccgtgcctggccctctttccttcttttaaataccttcttttaaataaactctcttaactttctcaaaactatagtttctaaataacacaatgtagtttctaaaactatattttgttttcctactcctaactgaaaaaagcaggtatgtggaatgtttacagatcctcaaaggaaaaaaaaaaaaaaaaactccatagtttatttgggcttggggattttccagggatccatgactgattaaagcctttcagaaggagcctcctcttgcatttgggtgttaatttcattattgctggtacattctataccaacgtgttgtccctgtatttccccattggttgtgtcacttgtccccttttcatctcctctggcatatcacagattacaagtgaaaccagatccaaagcatttctcagagctgcctctgatcaacctctgaaaatccagcagtgcatgattgtcttgtttctaagctactaacacaattgacgtttaacttccttggactaaagcttcctctggattctgtaacaatagacatagccatcttgtatgggatttttctattttttttttgtttgtttgttttaatttttttaagagacgaggttttgccatgttgcccagcctgatctccaactcctgggctcaagcgatccccctacctcggccccccaaagtgctgatgttacagctgtgagccactgcacctggccttaattttttaaatggataactggaagtttccatcgagggcccatatgttgaatgagtgtttgtgatgcggaggactctgctttgtgctagcatgaagaatacacgatagtcacatccctgaggagcacctcgtccataaggagtcctgcaatgggccgggcgcggtggctcacgcctgtaatcccagcactttgggaggccgaggtgggcggatcacgcggtcaggagatcgagaccatcctggctaacatggtgaaaccccgtctctactaaaagtacaaaaaaattagccgggcgtggtggcaggtgcctgtagtcccggctacttgggaggctgagataggagaatggcgtgaacccaggaggcagagcttgcggtgagcagagatcctgccactgcactccagcctgggcgacagagcgagactccgtctcaaaaaaaaaaaaaaaaaaaaaaaaaggagtcctgtcaggaaaatacagataaggtccgagggagtgaaggaccttagtgaaggtccttcactaagtaaaggaggagatgccgaggctgcctggggagaccacggagagctctgcagaggggtgacatttgagtttcaattgaatcttcacaatatactccattcctgcagctctgctcccgagctgtctctttgacctcagcctcttccacattccccctcattcatggtgttcctgaggcactgaccttctttctggtccttgaacatgccaagcttgccccccttcttggggcctggcattggccattcctcctgctggcatagttcttctcccatatgttccatcatttagcctgtgctcagtgctgccccctcagagcagcctgcactgacctccccagcttgtccacccagtcactctctgccatattacctaattttatcctctcagcatgtgtctgtgcctgaagttagctgatgcagttgtttatcgcttgtctttctcttccagaattaaattccttgaagatagtgattttctctttcttgttcaatagtatggccctatgtgtctagaacagtgacgcatggaagattctcaataaatacttgctgactgacagatgaacaccccagcccagtgtggacagagctctaaaatccttttttttttttttttttttttgagatggagtctcactctgtcacccaggctggagtgcagtggcatgatctcagctcactgcaacctctgccttctgggttcaagcaattctcctgcctcagcctccccaataactgggattacaggtgcccgccactacgcccagctaattttttgtatttttagtagagacgaggtttcaccatgttggccaggctggtctcaaactcctgaccctgtgattcacctgccttggcctcccaaagtgctgggattacaggcgtgagccaccacacctggcccagagccttgaaattctaaagccacatgctctgtcctttgctgcctgcttaccacagactatgtcaaaccagttatgctcccttctctttttattgttgcaaattcatgcttttgattttaaaggacacttctcttttcatatgacaatctaaccagtatctctttttgtttgtttgtttgtttaaagcatataattctaggtccctagccaagatgtctatttggaaatactctacaaccagtttctgtgtgtctgtgtgcttgagagtcgcaaaagtgtagttagtttgcaacttttcataattgaaattggcaccttcaatctgtgtgaattacgaagtacttctgcaacaccatatcaagatagctaatatacactcaattgaagaggacaaccttctgcaacggagaaggaccgttcttcattcaagggtgtatgagtagctgcactcccctactagaaactccaaacaagttctcaaaatagctaaatactatttacacggtgaaccatagttgcctttaagcgattgcattctgcaggtttccatcactcgtcatcctcggagaccacccagctgtggcccacagtgtacaggagtcctcctaactgcagctgctttctaggttctgtgtcacagtcttctctttcctttcgattttatgtggaccatcacaccagtgcctccacttcaaatcttatctctgtgccaatgatgtcttatccattatctctttgcccaagttctttcccaactcgatatttgatttgcagacacaaacttctaccttctgcacactcatggggaaaccttatctctgtcttaaaaataacatggctgcaatttctccctttcccctatcctcatagcttcttccctaatttactattgatgttagttgactctgttcttcagccacttcatctcaaaactctttaacttctctctcccgccctccctcttgccgctctgtgatccagttgatttctaactgatgaatatttagtcttcactttgcatcccataattctagtcctctttccacttatatgtgtcctagggagtgcccccagtgctctactctgggactgattcacccctaatgacgtctgtctgcttctagtccctccttgttaatcatgaactccacacacacattcaggttcctcaatttctcatacccctctagcactcagaaacctctagtgactcttcagcgtgacattcaaagctctcctcagtttcactcctatctgtatttctaactgtaacttttgtggccccgtacaccagcaaaataacatttctacctattttctgggcaagattcatatttcatctcttacgtctttgcacatactcctctctttacatggaattctttcccctctcatactgcctggtgacatttctacccattacgtgctcagagatttaaacagtgacatatgtctggagatttatttataatggctaaaaaggaaagaaaagggaacagcctgtgaatctaacaatagaatggtaaaattattctacgtgcacttaatgaaacatgatgcaggcattaaatatgccttccagaaatatttaatgaaaaatgcaagttccaaaattctatctgcatatagatttttatttatatatttgtatattaatatatgcatattcatagtgcatatatcagttatgaatatgcacaagtgcacacaacaaaaatgaacaatggcttaattatatcagtttggttgttttatgcaacaggaagtgggtaaacagctcaggactgctatgatgactcaaggaaacgaccaaggaccctgggtctttctgcctttatcctcatgttggttgcctcatggtcaaaagggggctgaaaaccccataggtctctcatctgtgttccaggtagcaggcagtgagaaggataatgatacaagagggagaagacacagcaatttttcctgctgagactttgactctattgaggaatgggggtcccctaggcacttctcttacatttcactggctgccacctgaccgtctctggctagagagaaggggttgtggccagatgctggatcaaccaataggcagagtttgccatagtggatatgcctgtaagattaatttcagatttgattttaatctcctttgatgctaggataatatgcatgtattacttttatatcagtgaaaaattgaaaatttaagaagctacctatctcacgatgaatgttatctcctccttaaagccttcattttaataagtggatgaggtgtttgtttgcttatttgcctcaggtatatgtggacataggatagattttagaatcagaaaaccatgagttcagattcctttgcgtccatgactaaactgcataatctttgaaagcctagtttcttcatctgcaaaatgttgattatactatactgtcttatggggcttttgtgaagattacattaaattgaatgagaaaatatagaagagactaatagcttgtcaatcactagttgttttttttctcttgaaaattcttgaaatacagtatctctcatttacctctcttttgctctttgttttaactgcatagtttctcatttctcaacattttttgggaaggccagtgactatacctttttttaaagaaactttaaaaaaaaaatattccttacagcccaggccaggtatggtggctcatgcctataatcccagcacttggggaagccaaggcgggtggatcacttgaggtgaggagttcaagaccagcctgaccaacatggtgaaaccccatctctactaaaagtacaaaaattaactgggcatggtggcagacacttgcaatcccagctactcgggaggctgaggcaggaggttcgcttgaacccgggaggtggaggttgcagtgagctgagattataccactgcactccagcctgggtgacagagtgagactccatctcaaaaaagaaaaaaaaaagtatatatatatatatctctcttcattccttacagaattcagaatagtgcctatagcctgtagtatatgagcaaccaatatattaaaattgaattgatattttatttaaaatacttgaatgatccgtcatgggataattgccaagaaattgatggtatcacttttcctccacactctgggctaggacatgggtaatgaattgggattgttgccaagcacctatttctgggtaatcactctgagtttgtgctgacagatgctggctccacattagtcatcgagaagccacaggggtgtagggtcttctagaatactgtcaacaccgcaagctgtgaggctttttcatcctgtccaagaaaaaaaatatagtaaaagactctcatgtcaaatttaaaatgccaaccttaaaaaaaaatagcagagaggtttattcttttcattctatttcaatgatgtagccagtgtaagatgttagaaaatgaaaagggagacccattaaagttctaattaggggaattaattaagagactcttaagggaattatgagtatgattctctaacaaataaacagtttcccttgtataatatctctctaccccaggcaaggcttgtggtgctgtgttgtcattgctcttgtcttacctgaaagtaatacagaattttgtttatggatgtctaaaactagctacagttatttttttgccctcttccctaagtcaaaattatgaaaagaatacatactattcacagttttattaatattcctggtcataatgctcccaaataatacatgcatctaataattccattctaggagtttccagtctgatgtattgataagtgcttatacccactctttctcccttactgtctttagtttctttttgttgttgttgttggaagcaccctggcctgtggtaggttcccattgcatttggcaaacaaagcattattcattggagtagctatgtggggctgggctgcgttgattatatggggccagttgggagacagcctcatttatttcgggaacacactgtgacaaatgtatgtgttcccggtggattccaaatgccataaacataggcagccagctgtcttggtaagtcaccattgctcaagtcttccggcattgttttatgcaatgtgatgctcagcaggtcaaactacctgctttaagaagcctgctacagggaggaggagaaacagcaggaattgggggaagaagtcctggggctccatgggaaagttctggtggtccattccagggttctgactcttggatctcatctgttgattgccctgcacctcaggaatccatttgtcctcccctacgggaaaaacagcaaagtacttcaactgcttactgctcttccatccacagtcacctgtgtttctgatactcttgcttttctctgatagtgcagtgggtcccaaaagtggatagtaaggaatttcaaacctcaagtttaaaaatcagttgaatcttaacttctcagagtcagaagacaactgaggctgggcacggtagctcacattgtaatcccagcactttgggaggctgaggtgggtggatcacttgaggacaggagttcgagactagcctggccgacagggcaaaacccagtctctactaaaaatacaaaaattaaccaggcgttgcggtgggctcctgtaaccccagctacttggaaggctgaggcacaagaattgcttgaacccagcaggtggagatcgcgccactgcactccagcctggttgacagagcaagactccatctcaaaaaataaaaataattttaaaaaaagaagacaactgaaagctgtggtttccaaactgtgcagtgaggtagagcctggggcaccacagcaaattcatgtaggtgctgtggatatttcaaatcttcaaggcaaacctagtaaaatttgttgctctggtcaccacggaagctattattttgaagtagttcataatttcagtgttcatggcgaaactaggattttggtgtttgctgtaacagaaagcaggggttaggcaaaactctttgtagaacaagaaatgaagcactttgcaatcgattccaaggtttgaaaagctgtgcagtgctgaacaggtccacacatcccattagtgagtaactgtgggaatgaaaaattaatgcgtacaacttttttcaaacagctacaaagttgttaggatataaataaatatgaagtcatttggacctaactacataaacaatcaaacttaggtgtttcttttatttatttttatttatttatttattttgagacggagtctcgctctgtcgcccaggctggagtgcagtggcgcgatctctgctcactgcgagctccgcctcccgggttcacgccattctactgcctcagacctccccagtagctgggactacaggggcccgccaccacgcctgcctaattttttgtatttttagtagagacgggtttcaccgtgttagccaagatggtctggatctcctgacctcatgatccacctgcctcggcctcccaaagtgctgggattacaggcgtgagccaccgcgcccggcctaggtgtttgttttggcttagggatgtcatgaaacaataattgagacacgaagggtactgtgatccaagaaaatttgagaacctctgccttcgagttcagctagtccaactagtctgatgtactaataattgcttttccccttactctctttatttcctctttttggaagcaccatgaccggcggtgggttctcattgcatttgacaaataaagcattatacattatggtagccatgtggggctgggatgatttgattatacagggccagttgagagacagcccacttgataatatttgacagtcattggataacattacaaatatttaacaaggaatgatgtcttaataagatactcaaactatagtaaagcaaagcatgctaccatttatcaccagcaatacttattaaaaatttaaaagatatatatttgctctagaactggtgggtctgaactcatcctcagaagcctgtgggagaaatcatacttttaataaagcaagattaagataacccaaacacacacataacatgttactaggctcataattttgagtaagagctttgttgagattacaaatgatgttttgaaatgaatacttgagttagggatggagttagtggaaattatatcaatattccactttccttttgctgttgtttcttacctaagttacagtaacatgaactcaaacctccaccattccttttctttagatggtactatgattggcttttttatttttatttatttattcgttttatttttttgagacagagtctcactctgttgcccaggctggagtgcagtggcgcgatcttgcctcactgcaacctccgtctcctgggttcaagagattcctgtgcctcagcctcccaagtagctgggatttcgggcgtgtgccaccatgcccggctaatttttgtatttttagtagagatggtttttcgccatgttggccaggctgatcttgaactcctgatctcaagtgatccacctgcctcggcctcccaaagtgctggaattacaagcgtgagccactgcgccctgccagtgctatagctggttttctatttgcccttgattgtatttgagaatttgggaacaaagaccatcacaaagtgaagatgacatgtaatcaaggggtgcaaggaaaggtagggaataagccctggacatgatacagatagagacagagatagaggtaggtataaataatttcagaatagtttttttcaaaaacacttaaaactcacaccaatttggcgaatgcctctggagaaattaaaaaaaaatttctttggtgtcttagggatacccatggccaagtatcagaaagttttacttgttgagtttaacctgaatgacagagcagttgtgagttatttgccactgggagaggattcactagctcccagagctgcagggcttccagatctacagggaacaactgcgtgagaggagaggcagatgtcaggcaaggccaattgagttctccctttaaaatatggatcagaatcatcattaatcaaacagcaaatactttcaagctctgtctttagggaagcaactatatgtacattggcaaagaagattgtatagactgtgggtggcctgggatgctaaatttaaaagtttgaggtttatcttttctacagtgaaggaccactgaagatttttgatttaatgaaagaagtattttcccagcactttgggaggtcagggcaggtggatcatgaggtcaagagatcgagaccgtcctggccaacatggtgaaaccccatctctactaaaaatacaaaaattagctaggcatggtggtgagtgcctggagtcccagaaatcacttgaacctgggagatggaggtggttgcagtgagccgagatctcgccactgcactacagcctggtgacagagtgagactctgtctcaaaacaaaacaaaacaaaaaaaaaccattgaagagacatttttacaagcagtcagtggtactttaaagcccttcattggagctgcttcgagaatagtgttgggctcaggaggcagaggatgtttaatgttctctacagcagtgctatccaacagaaatataatgagaccatgtatgttatgctaagtcttctgcatgttaaaaaaaatttaaagccaaaaaatatttaacccaacacatcaatattaaaaattatcgatatattttacattattgatactaagtctcctaaatccagtgtatattttacacatataaacatttgtccattgggtctagccacattttaagtgttcaatagctacatgtggcttttcactactgtatcagacagagcaggcccatcgccttgctactgcaagtgtgatctgcagaccagcagtattggcatcatttgagagcttgttagaaatgcagaattctcatgccctacctccgacctattgaatgagaggataaattttaataattcaaatcaccccaggtgatttgtgtgcatgttaaagtctagaagcactgacttctagcacagtggttctcagcatgatccttagaccagggacagcagctgctttaccacctgggaaatttgtggggttttttgtgtttttttgtttgtttgtttgtttgtttgttttttgagacctagtcttcctctgtcacccaggctggagtgcagtggcatgatctcagctcactgcagccttgacctcctgggctcaggtgaccctcctgcctcagcttcccaagtagctgggaacatagatatgtaccataacacctggttaatttttcaaaattatttgtagagacagggtctccctatgttgcccaggttgatctcaaactcctgagctcaagcgatcctcctgccttggtctcccaaagtgctgggattacaggcatgagccaccacgcccatccccacctggcaaatccttgagttccaacacagacctattaaatagaaactctggagccagaaatttagttctaacaagccgtccaggtgattcctatggacattcaagtttgagaaccactattttagaacatctttctctagcaaaaatattgttatcttccctatggaccttatattttgatttttttttctaattcaattttttaaggaactaatatagcttggcactatcattactcaacacacctctcttcattgataccacagggagggaaatggaaacctactaggatattctattattaaacatatattgatatatatgcatatatatacaactattgaaataagtttcaataataatttctggtcagtatgtaataaaagctacaatgtattgagcatttcctgtgtcttcagccctatattgatattttacacatattttctctagccctcttctagctctttgtaaggtaggctgaaatataggaatatccacatctcacaatgagtgccctagtttcccagggcttacatctggtcggtgacagagccaggaccccaccttggtcagcctgatcccaacgcctgtgtgtaccactcactaccctgcataagcattaccctgctatgtttaaataaactaaaagcaaaagcactcgagattttagtgagtgtgcactgaaagtgtgatgatatttgaaacactgaaaatagctcacaggttaaccatcaactgtcctccctacacacacacacacacacacacactcaattttggttttgttttgagacagagtctcactctgtcacctaggctggagtgcagtggcaaaatctcagctcactgcaacctccgcctcctggcttcaagcaattctcctacctcagcctcccgagtagctgggaccactgccatgcaccaccatgcccggctaatttttgtatttttagtagagatggggtttcaccttgctggccaggatggtctcaaacttttgacctcaagtgatctgcccgcctcggcctcccaaaatgctgggattacagacgtgagccactgtgcctggcctatacacactcaattctacctatactacctacaatgatttctggttagaaaccacagcccagggcagcacaggctcagataaatccaaagaagacaagggtaacacagcattgaatatcttcacagcagcacagcagtggctgacagtgagggactgagagaataggggtgggaagaaatcgagtcctctgcctatcaaaagagtctttaatcactgacattgtttagaattgctggtaccagataaaccaacagagcttttggaatttatttttaaattccctgcagacaaggcctcctttgattgccctagaacagaatgctccgtctgctccccttgccctcattatttcactgccttgttgaaaataacgggatattttgctaagggtctgtcctgatgcttccctagggtttggaatgttttgattgggggcacaagaaatctacaccataaaagtctccaggagagaaggtaattgccccactcatgccactctatcacctcccacattgctctgcatgagtggctcacctgcaagtgattgctcatgcaattacataaaacaagtagatgaacaactggatataacaattcaaatattctcttcagggttccctgaatattcagctcccccttggcaaccgtctacgtgttccctgggtaatttctggatacactgcagtgttgaagaggactctgataattagcttcaaattgttttccgtcccacagcaaagtatctttgcactggagtagaatgtaaagacacaaagccagccattttcctgaaatataacatgtttatgtcctttctagacatatggagggatcagtggcttcttgatagggtgaaatgtagtacttattttctaaagtcaatcatcatttttgtttcattctataataacacagattctgcaacatggcagcagcttgggattctgtggagactacattgtgatttgagtgttaattaacgcatttgtagctggcagcataatacaaacatccttctctctcgacagaatcattgcaacaacaccatcttgtcttcctgaaaacctatgctttgaaaatagcctgggaaagtcagcaccagagtagtcattggaaagcacctaggaagaaaaatacagccttatgatggatttgtgaagaaaaattctcatgataaaagcttcatttctctccaggacacagtgagggaccccatagatgagagcaatgcaagtgcattgtgctgggacttactgagttgtgataactgacgaggtttctattctgccggcagaagtggacttggaacatgggaagtctagaagctggaacacaagataggttagagcaccaataatacatgcagaaagatggaatagctaaaggtttataatgaacatataaatggcaagtgtatatatgggcgatcacaatagcatttcagcacatagagactgggtgaagatattatagttctagatgctggataagctttaacctggtaggttgttagaaatcattggtcagcacaaaggatagctcagggaatgtgtacatttgttatcaattaagccattttatctaaatgcagacagttgattagcacttatttcacctatttcaagaagtgggcaccagcccaatggtaaaagaccagtaattcgcatccagcctgggcccccagtgtcagagcctgaatctttgcaccggactcaccgtgttggtccctgccatgtgtcccagatgggtttgtagaccttgtggaaggcgatttggtaacttgctgcccgtgcacttttgggctcagtagtgacaaaggatcagtggaaatcccctgtctggaggccttgctagcttgttcctggatcccagcagagggggccctgtactccttttgaaagaggaatacttatttatagattttatggaaaattatgagattctcaagagttgccagtctgaaaagcaaaaaacaattaggttgacctgctctaatttaaaagcatttacctggaattgttgtggtttttgtttgctcttcagtgcaaattttttttatttttataagttctagggtacatgtacaaaacgtgcagttttgttacataggtacacacgtgccatggtggtttgctgcacccatcaacccgtcacctacattaggtatttctcctaatgctatccctcccatagccccctaccacccaacaggccccggtgtgtgttgttcccctccctgtgtctgtctgttctcattgttcaactctcacttatgagtgagaacatgtggtgtttggttttctgttcctgtgttagtttgatgagaatggtggtttccagcttcatccatgtgcctgcaaagaacatgaactcatcattttttatggctccatagtattccatggtatatatgtgccacattttctttatccagtctatcaatcactgatggacatttgggttgctactgtgaacagtgctgcaataaacatatgtgtacatgtgtctttatagtagaatgatttataatcctttgggtatatatccagtaatgggattgttgggttaaatggtatttctggttctagatccttgaggaattgccacactgtcttccacaatgattgaactaatttacactcccaccaacagtgtgcaagctttcctatttgtccacatcctctccagcatctgttgtttcctgacttttaaattatccccatactaactggtatgagatggtatctcattgtggttttgatttgcatttatttgatgaccagtgatgataaacttttttcatatgtttgttggctgcagaaatgccttattttgagaggtgtctgttcatatcctttggacactttctgatggtttttcttcttgtaaatttgtttaagttctttgtagatgctggatattagccctttgtcagatggatagattgcaaaaattttctctcattctgtaggttgcctgttcactgatgatagtttattttgctgtgcagaagctctttagtgtaattaagtcccatttgtcaaatttggctttgtttccattgtttttggtgctttagacatgaagtctttgcccatacctatgtcctgaatggtattgcctaggttttcttctaggatttttatggttttccatcttacatttaagtctttaatccatcttgagttaatttttgtataaactataaggaaggggtacagcgtcagttttctgcatatggctagccagtttccccaacaccatttattaaatagggaatcctttccccattgcttctttgggtcagatttgtcaaagatcaggtggttgtagatgtgtggtgttatttctgagggctctgttctgttccattgttctatatgtctgttttggtaccagtaccatgctgtttttgttactgtagctttgtagtatagtttgaagtcaggtagcatgatgcctccagctttattctttttatttaggattgtcttggctatgcgggctcttttttggttccatatgaactttaaagcagttttttctgattctatgaagaaagtcaatggtagcttgatggggataacattgaatctataaattactttgggcagtatggccattttcatgatattgattcttcccatccatgagcatgggatgtttttccatttgtttgtgtcctctcttatttccttgagcagtggtttgtagttctccttgaagaggtcctttacaccccttggtaagttctattccattagtagcaattgcgaatgggagttcactcatgatttggctctctgtttgtctattattggtgtataggaatgcctgtgatatttgcacattgattttgtatcctgagactttgctgaagttgcttatcagcttaaggagattttgcactgagacagtggtattttctaaatatacaatcatgtcatctgcaaacagagacaatttgatttcctctcttcctatttgaataccctttatttctttctcttgcctgattgtcctggccagaacttccaatactatactgaataggagtagtgagagaaggcatccttgtcttatgctggttttcaaagggaatgcttccagtttttgcccattccagatgatattgatgtgggtttatcataaatagctcttattattttgagatacattctattgatacctagtctgttgagagtttttagtatgaaggggtgttgaattttgttgaaggccttttctgcatctattgagataatcgtgatttttgtcattggttctgtttatgtgatggattacatttattgatttgcatatgttgaaccagccatgcatcctagggacaaagccaacttgatcgtggtggatacgctttttcatatgctgctggatttggtttgtcagtattttattgaggattttcacatccatgttcatcagggatattggcctgaaattttctttttttgctgtgtctctgcctggttttggtatcaggatgatgctggcctcataaaatgagttagggaggattccctctttttctattgtttggaatagtttttttttattattatactttaagttctagggtacatgtgcacaacgtgcaggtttgttacatatgtatacatgtgccatgttggtatgctgcacccaataactcatcatttacattaggtatatctcctaatgctatccctccccccacctcatgaccggccccggtgtgtgacgttccccttcctatgtccaggtgttctcattgttcagttcccacctatgagtgagaacatgcggtgtttggttttttgtccttgcgatagtttgctgagaatgatggtttccagcttcatccatgtccctacaaaggacatgaactcatcattttttatggctgcatagtattccatggtgtatatgtgccatgttttcttaatccaatctatcattgatggacatttgggttggttccaagtctttgctattgtgaatggtgccacagtaaacatacatgcgcatgtgtctttatagtagcatgatttataatcctttgggtacatacccagtaatgggatggctgggtcaaatggtatttctagttctagatccctgaggaatcgccacactgacttccacaatggttgaactagtttacagtcccaccaacagtgtaaaagtgttcctatttctccacatcctctccagcacctgttgtttcctgactttttaatgatcgccattctaactggtgtgaggtggtatcccattgtggttttgatttgcaattctctgatggccagtgatgatgagcattttttcatgtgtctgttggctgcataaatgtcttcttttgagaagtgtctgttcatatccttcacccactttttgatggggttgtttgtttttttcttgtaaatttgtctgagttctttgtagattctggatattagccctttgtcagatgagtagattgcaaaaattttctcccattctgtaggttgcctgttcactctgatggtagtttcttttgctgtgcagaagctctttagtttaattagatcccatttgtccattttggcttttgttgccattgcttttggtgttttagacatgaagttcttgcccatgcctatgtcccgaatggtattacctaggttttcttctagggtttttatggttttagatctaacatttaagtctttaatccatcttgaattaacttttgtaaaaggtgtaaggaagggatccagtttcagctttctacatatggctagccagttttcccagcaccatttattaaatagggaatcctttccccatttcttgtttttgtcaggtttgtcaaagatcagatggttgtagatgtgtggtattatttctgagggctctgttctattccattggtctatatctctgttttggtaccagtaccatgctgatttttggttactgtagtcttgtagtatagtttgaagtcaggtagcatgatgcctccagctttgtacttttggcttaggattgtcttggcaatgcaggctcttttttggttccatatgaactttaattttttccaattctgtgaagaaagtcattggtagcttgatggggatggcattgaatctataaattaccttgggcagtatggccattttcacgatattgattcttcctatccatgagcatggaatgttcttccatttgtttgtatcctcttttatttcgttgaacagtggtttgtagttctccttgaagaggtccttcacatcccttgtaagttggattcctaggtattttattctctttgaagcaattgtgaatgggagtttactcatgatttggctctctgtctgttattggtatagaggaatgcttgtgatttttgcaccttgattttgtatcctgagactttactgaagttgcttatcagcttaaggagattttgggctgagacgatggggttttctagatatacaatcatgtcatctgcaaacagggacaatttgacttcctcttttcctaattgaataccctttatttctttctcctgcctgattgccctggccagaacttccaacactatgttgaataggagtggtgagagagggcatccctgtcttgtttggaataatttcagaaggaatggtaccagctcctctttgtacctctggtagaatttggctgtgaatccctctggtcctggacttttttttttgtttgataggctgttaattagtgcctcaattcagaacttgttactggtctattcagggatttgacttcttcctggtttagacttgggagggtgtatgtgtccaggaatttatccatttcttctagattttctggtctatatgcgtagaggtgtttattgtattctctgatggtagtttgtatttctgtgggatctgtggtaatatcccctttatcatttttcttgtgtctatttgattcttctctattttcttgtttatttgtttggctagaagtctatctattttgttgatcttttcaaaaatccagctcctggattcattgatttttttgaagggttttttgtgtctctatcgccttcacttctactctgatcttagttatttcttgtcttctgctagcttttgaatttgtttgctcttgcttctctagttcttttaattgtgatgttagggtgtcgattttagatcttccctgctttctcttatgggcatttagtgctatcagtttccctctacacaccactttcagtgtgtcccagagattctggtacattgtgtctttgttctcattggtttcaaagaacatctttatttctgccttcatttcgttatttacccagtagtcattcaggagcaggttgttcagtttccatgtagttgtgcagttttgagtgaatttcttaattctgagttctaatttgattgcactgtggtctgagagactgttatgatttccattcttttgcatttgctgaggagtgttttccttcaattacgtggtcaattttagaataagtgcaatgaggtgctgcaaagcatgtatgttctgttgatttggggtggagagttctgtagatgtctattaggtccgcttggagttaaagtcctgaatatcttcgttgattttctgtctcattggtctaatattgacagtggggtgttaaagtctcccactattattgtgtgggagtctttgtctctttgtaggtctcttagaacttgctttatgaatctaggtgctcctgtattgggtgcatatatatttatgatgataagctcttcttgttgcactgatccctttaccactatgtaatgcccttctttgtcttttttgatctttgttggtttaaagtctgttttattagagattaggattgcaactcctgctctttttttttttctttccatttgcttggtaaatattcctccatctctttattttgagcctatgtggttttttccatgtgagatgggtctcctgaatacagcacactgatgggtcttgactctttgtccagttttccagtctgtatcttttaattggggtctttagcctgtttacatttaaggttaatattgttatgcatgaatttgatcctgtcattgtgatgctagctgattattttgcccattagtagatgcagtttcttcctagtgtcgatggtctttacaatttggtatgtttttgcaaaacacccagctagtaccaggtgttcctttccatgtttagtgcttccttcaagagctcctgtaaggcaggcctggtggtgacaaaatctctcagcatttgcttgtctgtaaaggattttatttctccttcagttatgaagctctgtttggctggatatgaaattctgagtttaaaattcttttaagaatgttgaatattggcccccactctcttctggcttgtaggctttctgcagagagatctactgttagtctgatgagcttccctttgtggataacatgacctttctctctggctgcccttaacattttttccctcatttcaaccctgttgtatctgacgattatgtgtcttggggttgctctgctcgaggagtatctttgtggtgttctctgtatttcctaaatttgaatgttggcctgtcttgctaggttgggaagttctcctggataatatcctaaagagttttccagcttggttccattctccctgtcactttcaggtacaccaatcaagtgtagatttggtcttttcacatagtcctggatttcctgcaggcctttttcattccttttcattcttttttctcgctttatttcattaagttgatctttaatctctcatatcctttattccccttgatcgatttggctactaatactcatgtatgcttcacgaagttctcacgctgtgtttttcagctccatcgggtcatttacattcttctctaaactggttattctagttaccaatttgtctaaccttttttcaagattcttagcttccttgcattgggttagaacatgctcctttagctcagaggagtttgttattacccaccttctgaagcctacttatgtcaattcatcaaactcattctccatcccattttgttcccttgctgttgaggagttgtgatcctttggagaagaggtgttctgggatttggaatacttagtatttttgcactggtttctccccatcttcatggatttatctacctttggtttttgttggtggtgatcttctgatggggttttgagtggatatgctattcctttttgttagttttccttctaacaggcccctctgctgtgggtctgctggagtttgttagcggtccactccagaccctgtttgcctaggttatcactagcggaggctgcagaacagcaaagattgctgcctgttcttttttcttgaatcttcatcccagaggggcacatgccagatgccagttggagctctaatgcatgaggtgtctgttggccccacctgggagttgtcttccagtcagaatacatgagagtcaaggactaacttgaagaggcagcctgacctttagcaaagctcaaacctgtgctgagaggtctgttgctctcttcagagccattgggcaggggcgtttaagtctgttgaagctgtgcccacagccaccccttccccctggtgctctgtcccagagagatgagggttttatctataagtccctgactggggctgctgcctttttttcagagatgcccttcccagagaggagatatctagaaaggcagtctggccatagcagcctagctgagctgcggtgggctccacccagttcgaacttcctggctgctttgtttacaccgtgagggtaataccacctactcaagcctcagcaatggtggactcccctcccacaacgaagctggagtatcccaggttgatctcagactgctgctgtgctggcagcaacaatttcaagccagtggatgttagtttgctgggctccatggggttaggacccactgaaccagaccacttggctccctggcttcagcctcctttccaggggggtgaatagttctgtctcgctggcattccaggcaccactggggtatggaaaaaaaaatcttgcagctagttcagtgtctgcatgaatggtcacccagaaacccagggcccttgtggggtaggcactggagggtatctcctggtctacgggttttgaagaccatgggaaaagtgcagtatcagggctggagtgcatggttcctcagattcagtccctcatggcttcccttgggtaggggagaaaattccccgaccccttgcacttcccaggtgaggtgacaccccaccctactttggcttaccctccatgggctgcactcactgtccaaccattcccagtgagatgaacctggtacctcagttggaaatgcagaaatcacctgccttctttgttgatcttgctgggagctgcagactagagctgttcctatttgaccatctttccagccatacccttttttcatgttttgggggatactaatggttgcctgagaaaggtaggcttcatgtgtattaagaaaggcctttcagtgttaatatacattgtttatgggggaattaaagcactcccagccccatggagtcatttgaaattcttaattacgtatgttgtgggcataaatttattagggccttctctcttctcccttttctttgtctttataagtagcagaggtcctgaagttcattctgaacattcagtaatggaatcatggggggtggtaaaaaaaaaaaaaaaaaaaaacttcattaattaaaaactgtcatggataagctgtgtgaatgagtgaagtgtgacatacagaatacctttaaacaactgctattttactattttaaaacgcatacttcatataccacatcaaagcagcctcagatccaattgtcaaacagatgttttgcagcggattgttgttttaatgagccaataactcattcccaacaagcttggtttgcatatcatcagtggtactcaaaatatattggtacctttaactgagttaaagatgaatgccccaaaacctttaagagcctcttacttcataaatagtggaaatgtattctgtaaccccaaattactgtaatcttaaatttgtgctgtttaataaggaattattatatatattcttacttattactataaacttggacttaagaaaagctcttattgccaaaactattttggccaaacatttttgtcatctcaccactgcctaggctgcagtggagttcttgtagcttcaaagtgcttcttttcacatcttctttgatatgctgacagttaccagactaaataatcaaaaaagtattcattaaatgaaaacaatttcattgttgacacgttcatattaccctggtagtataaagacatacatgtttgatttgttagtccaattaatgtattatttgtgttcaattaaaggctttctttaaaggcgattgttaaccattatgatgacatggataaacaaacatctataagattattaaaagaccagctgttcctaatcaagatgcatcattctcactaggtgtttgtttttgtaaatgctggagattctggttccattgatttgcagtggcacctcagcatgtgcattttgaaaatacttgctcagtatattttgttgtgcactctggtgaggaaccacttcctcctccagcaaacattcatcatttatatgcagcaatgtaaacacatgtgaatgagcaaattgcccacctaaatctctgcacaaaagggtgtctaatatatgccaaattattttgtttttacatctgccgtgatgcacgacacacattgttttcacgtaggcaatccacatctatggatgtatttactggatgtgtgattttggataagtttctgtacctctctgtgccttattgcctcttctgtaaaatggggatgaaagcctgatactcagtgtttttgtgaggacttaacaatatcatgtatgtgaaatagttagaactttatcaggcagttattaaaggttccataaatgttagtgatatggtttggctgtgtccccacccaaatctcatcttgaattgtagctcccataatccccacatgtcatggaagggacctggtgggaggtaattgaatcacagagatgggtttttcccatgctgttctcatgataatgaataagtctcatgagatctgacggtttcataaagggcagttcccccgcacatgctctctcttggctgctgccatgtaagatgtgcgtttgctcctccttcactccctgccatgattgtgaggcctccccagccatgtggaactgttagtccattaaacttctttttctttataaatgacccagtcttggatatgtctttattagcagcatgagaacaaactaataagttagttattatagttgtcactgtgaatgctgctatcacagtcactgtgtctatccaggaccctgttatagccaactagccaacatggctactatttattattattattattattattattattattattattattattattgtctctcactctcaaaaggctaccagaaagcaagtgactatgactttatagtaggaataatggtaaatctaatttataaaggcaaattaggcttcattctttggaactttcattttatcagtaacagaattacatgtacagctcaattcaatggacattgaagcatatcataccactaactacagtggctcataaaatatatcactagtctgtgaattttaaagaaggatgaatttctccattttccctaagttaacttccttcctgaaaaactatgttatcagtcagcatctatttggtcagtaacttcaagtaaaatgtaggagatatcacatatgtgaattagttagaactttgtcaggcagttattaaaggttccataactattagtgatatgcgaggagagtataatgagtcagtaactaaagaggtggaaaaatcacttgctgaataaaatcagtgtcttccttgacatattcacttttaataatcttgggatttgtttcgggtttcggagtcgaatgatgcatctgtgccaaagagaaaagcctggaggtatgcagtgctcccatcagggtgtatgtgtgtacatgcacacatgtgcatgaacatgggtaaatagaggcaagtgttgttttgagagggcccagctaacttggggtttcagcaccagagtggctagccaccctgtcctaaacaggaaatgaaggggagctgaacgtggatgtttgctgtatgccttttatggaacgcttcttttggctggaggacagcctaatgcccagttgtcccacctgtgaccaggagggtctctcatatagggagcttgtttatgctggcagatgcccttgtggctcttgtctgacccatgtccagtttatgcctgcctgaccatagctctggcactgggagcccagccttgtgttctccccagtgtcccagggaaaacccagcctgggatagcccctggttcttcagatggtgcaaattcaatacaccaccacaacaggaagcaagttcaaagatttttacttacggatcctgagcaaggacagcataatgggtcagggtgtggtgcggggcagcgcttcgtccctgggttatgcaaggaaggactgaacagtcaggcagagatggagaatgcatggcagctagtagtttgtacaagggaatagggtgtgtgtcactttaagttcccaggtaaatgcctgaatggtccatttaaaggacacactgggaaaacgaggaacccagtcaggtaggtggcagagatgcttctgagttctcatcatctctggccaccagcatgagccatttgggtgtggtatagcactggaaattgcatcaaggatgaccgagccctgcttttggtatgagaaagttaaacctacatttaaaatggatgccaaggcaacataaaattataagaatttactgtattttagaatagcatcagcttttatcttttccttaatcacacctatcagtcagaatagaatctaagggttgttcattggtttccaagtgtttaccattgtgaaggtttgagacatgctttttttcatagtctatattttacatcccactggttgctggcaggtttttttttttttttcctttaaagccacacacaacctatttatcagactaaggatgtgaacagtcttttttaaatttcccataaatgaaagttatcagactaaggatgtgaacagtcttttttaaatttcccataaataaaagttataacttgcactggagaagatgctttcttgcaaaaggtcattgaaatctcaagatggtaaaagtagcttgttctagaaatatggctgcataatggtaaccacagttcaaaccttgatcacttgagtttttttttttcttaagtaaaatatcaagccctgttcttgctccctctcagaaaagaacaattttcttctgtgaaaggaatgtaagtgaaaaggggagaggtgggaagctatttcatctgagagagacctctcacccccactatatcatcccctgtggagtttttattccaccttagggaaaagcttttgtaagataatcaattttctgttaaagccaggtagatactggcaggtgggaaaacagtcatgtggtctgtggaagggtggaaggttatgaacaatttgcattttaggcagagcagcaggaaactcataaaagaaaagcaccttcagagatttacaagtaacatgtaaatacttggaaattaatcacatacaaatcaagtatagaagtgctaagcaactgtatactaagttgtagacataattggaggctcaagtgagataacttaggcagtgtttcccaaaagtagtgtaatgaaggttgtgaaagtgaagactcctggggtaatgtagacgtgggaggagcctttctgtccacacctgttgtcaacccattgcatctgtcagatttgttcactcactggatgcttgctctgcttctacatgttaaaacagataaataacattattgcatttcaaaacctttccttttttgcttatagtgtcttgctcttgacctgaattccatttgcaaataacatgtccatgtactgatgattaacatggcccgtcagtgaatctggagactggtcatgcttcaagaacaatactggagatttttttttttttaatatttgtcaattcactggaaaaatttaatagaaccttccaggggtgtacagtttcgtttggataaagcatagatacttttcacatacaaaattagttttaacagtcacttcccccacattcacttgggcttctgacatccagtggggttgaggaagattttatttccaagaacagatggtttttctgcactttccataattgcatgcaactgcatgaatttcttttttttttttctgcattcagatgcatgaccaatggctgggtattaggagtttgacttcctttacccaaatgcctctttaaaaataacgataatgactttcacagatagtcacttatcctttgcacatacatggtcttcaaaattgactccctaaaaagcctcaaactaactttgccaaaattaaggaattgaaggatgaaatcacttatagacagctggaggcttattcacatctgctggaatgtatatatatacacacacacacattttataactctctctttaggagacccaaaagaaataaaggatactgtttcctttctccagtgaagagactgacccttgttacccgtctctccctgctcatcctgctctttgatcatcttctcttctcctttcttcctttccatttccttttccatctcctttcacctttttctttctctccttactttgctgaatggtagagaattcctagtcaacccagcccaaattcttgagacacaaaaagacagggaaaatgctgggagatagaatgaatggacagcagtgacatcattgtcctatttcacatttattagaaagaatttattttctgacatgatgattaaacatcctttccacctctttctctttccttccctccctctcttgttctttgaattctaattcaattacaataaaatccacacaggatttctctcttctcaatgacagcaattaagacttgagggaagctgggtgcagtggctcacgcctgtaatcccagcactttgggaggccgaggcagctggatcacgaggtcaggagatggagaccatcctggctaacacagtgaaaccccgtctgtgctaaaaatacaaaaaattagccgggcgtggtggcgggcgcctgtagtcccagctactcgggaggctgaggcaggagaatggcgtgaacccgggaggcggagcttgcagtgagccgagatcgcgccactgcactccagcctgggtgacagagtgagactccgtcgtctcaaaaaaaaaaagaaaagaaaagaaaaaaaaagacttgagggaagtattttccctctttttcttcacagacatttccatgaattgattctttacctagtcctgagatgtttataacattcagaaccagaacaaactaataaacacctgtagatattagtatgaactgggtatgaaagctgcaggatttctgcctactatttttgtgaagaatggtattgattattgctaatattcttttttacattcgccatcttggtgggttagagaatattctgctgccatgctaccatctaccctccaccccaaatatttctaacctaagaataatgcacatgctttgtgattctggcatggctggagctgtctgtctattctaatttagcagagaaccattttgcaaaatttttaaaattataactgagccagggaaaaacttctcgtagctttttagcatcacggctttgatcgtgaaagagaagcagaagctagaactcaatgtttgttagaaatactcaaccacacatacagtaacattctgcgtagacaatcactaagatctcaaccctgggcaattttttttaatacattaaggttgtctgcaggactgagaaaataaaatagctaaatctaggcaataaatgcagacactggcttcctggggatttgggctacacaattttctttgcattttaggtttctcggttacagagtgactgacaataatcatattgacctgcttcctgtaatggttgtagtcattgcctagtggcttttcaactgataaattagtaccctgccaaggagaaacgactgatggagtgtaacaatgaaaaagcactttagcagtgacaatgctcagcaaagagcttccagtttatctggaggagaaagaaatgttccttcctattgaataaaaacaacaaaggttcctgcttccagtgttcctggttctttcgttctgtgatgtcaatcttttgacattttaattggaagtttcattttgtgtaagatttaaaggagaatttagcttccaaccccaacttgttaattgaataaatgtcaacttcttgactcaattcattttatactttaaaaaaacgtatgccaaatatttattttgttgcctaccaaataggcaataactagcctttgaaacatgcagaggattacagtgtttgccccacctctgaggttgaacagctgtgtctgttgttccgagatgtccagcttgcaaggatccagtgtcatcaaccagagtaggaatctctccttcccctttaccgtagcagctccgatgctctatgtggttgtacctcagtgttccctgtcttgattgagaaatcatcaagggcaccaaatatatttctaacagtccctgctagacatttataatctcttctttcttgacgtatattacttctggacgagatcttcaccaccaaaatgagcaaaggaaaggagagtgaaatgttcctaagtcagaatcaactgctgtgactgtgtgtgcatcaatttatctgcagtgttcacgagcatctcacttcacatatccaactcaggacctctggacaaaacttaaatattcacaatgaatattttcctcaaaacattatgttaatttttataatataggaaacttaaagagaaacatacattgcaaattcaaccactttaatactatttttttttctgttcccacaggtacatatacttctatatagctgtaaatagatgatatggtttgtgtccccacccaaatctcatattgtagctcccataattcgtgggagggcgggtctttcccatgctgttctcatggtagtgaataagtctcacgagatctgatggttttataaaggggagttcccctgcacatgctcttgcctgctgccatgtaagacatgcctttctcctcctctgccttgtgccatgattgtgtggaatccccagccatgtgcaactatgagtccattaaatgcctttttctttataaattacctagtctcaggtatgtctttattagcagcgtaagaacagactaatagattatacctagaatgcacaaaattatctattaaaatattttatgatttacaatgcagtaaatattattgtaccaacttaaaaatactgataaaaaaagataatataagtccccatatgctgccattgtttacttttgtcttaaaaagcaatcatattgtatctagtatcttataatctcctgtttacactttagtcatgaaataaactttttttaattattattttttgagatggattctcactctgttgctcaggctggagtgcagtggctcgatcaaagctcactgcaacctccatctcccggattcaagcaattctcctgcctcagcctccagagtagctgggactacaggcgtgtgcaaccacacccggctagtttttgtatttttagtagaggtggtgtttcaccatgttggccaggctggtctcaaactcctgacctcatgatccacctgcctcaggctcccaaagtgctgggattacaggcgagagccaccacactcggccaaaatacacattttccagtgtcaataaagttatctataaaatcatgaaaggctcaataacatattcacttacatggacatattgtcatttatttaaccacatcctaggggccatttagtttgtttccaattttctgcccttctaacatgcacctgttatctcaggaatgttatgttgaacaactcagtgatggttgagttaggggtgtgatctctctaggtcttgacttctcctttaatatgagagatttcaaatagttatttctaaatattaacttctgattctaaaagcctgtgggccatctgcctagaatcccaatgctttgagaggctgaggtgggaaagtcacttgagcccaggagtttgagaccagcctaggcaacataatgagtcccctctctctaaaaagaaaatagacaaaaattaattagccagatgtggtggcacatgcctgtggttctggctacttgggaggctgaggcaagagtattgcttgagcccaagaggttgaggctgcagtgaaccatgactgtgtcactgcatttcagcctgggtgacaaagcaagaccctatctatctcaaaaaaaaataaaagggaaaaaaaaagaattcagctaatatttttaatgaattgctaaaagcaagtgttgtctaccaaaagaatatgcagcctctctggaatatagacacaaggagaaatagcacccaatcttagagttttctccatggacctcaccaagttgtcacaaaaataattggcaaaatttctataaaagccatctccattgcataaacttggggttgaagaatagcagctgctgcagaaaaggcatgaaatcctacctggagctttcttcacggtaaactactagagaaagaacaaagtctgttgacattaagctactggtagaaacccattgaagctgggggaaggacacggaaagccctccaaccctggagggtagggacagatatacccagtgattacagacctatgggtggaggtctggggcaggatcacggagaaagccccacctcggagaaccgtaccccacctcggagaaccataaacacagtggctgcctaacagtaaagcttaatcagaaaaacaaagatttttctataacaaattcatagcattttcttgccagaaaaggagcaaacacattactagaccaccattgaggtgcagtgcaaaggagagacctaacctgagggtggagcagacactgacaacacacaccttgcaaaccgtgtctcaccctaaacacaaggtcaacactagggttatttgaaatccttgattcactaaaggtaatcacagcagcaacaaatcccaaacccaactgaaatcttaactagatgacttttacctttctatatccaacacctagaagaaagaaatatattcttattatcaagcataaaaaaatttgcgttcgtctatactgtcttatacaagatgtccatctttccttaaagtcatggggcgtatcaatatattaagaaaaacacaaagcaattagcacaactagactcaaatatgaaacagatattgaaactagcatccaagaaacttaaactacaatatattaaaagattttaatagcagaggtggataacatgctaaaactgatgcttaattttagtagagatttaaaacatatgagaaaggattaaatggaaatgcaacaaatggaaaagaaaataaagattttctctcaataggttcgtcagtagagtgggcacagttgagggaagaatcaaaaaacttgaaggtaggtcaatagaaatgactcaaactgaaaggacaaagaaaaaataggagactgatggcaagacggctgaataggaacagctgcagtctgcagctcccagtgagattgacacagaaagcgggtgatttctgcatttccaactgagttacctgtttcatctcactgggattggttggacagtgggtgcagcccatggagggtgagctgaagcagggtggggcattgcctcacccgggaagtgcaagaggttggggaattttctcccctaccgaaggtaagctgtgggggactgagcctgaggaaccatgcactctggcccagatactgtggttttcccatgcatggtcttcgcaacccgcagaccaggagattccctctggtgcctaccccaccagggccctgggtttcaagcagaaacctgggtagccattccagcagacactgaaccagctgcaggagactttttttctataccccagtggtgcctgggaggccagcgagacagaactcttgactcccctggaaaggaggctgaagccagggagccaagtggtctggttcagcgggtcccacaccaacaaaacccagcaaactaagatctaatgccttgaaattctcactgccagcataccaggaggctcagatccacctgggatgcttgagcttggtgggggaaggggcgtctgccattgctgaggcttgattaggtggttttaccctcatggtgtaaacaaacaaagctgtccagaagtttgaactgggcggagcccaccagagctcaggaaggccgctgtggccagactgccagatttctcctctgggaagggcatctctgaaaaaaaggcaacagtcccagtcaggaacttatagataaaactcccctgggacagggcacctgggggaagggacagctgtgggcacagcttcagcagacttaaacatccctgcctgacagctctgaagagagcagcagatcccccagcacagcgttggagctttgctaagggtcagactgcctcctcaagtaggtccctgaccgccatgtatcctgactgggagacacctcccagacacctcatccaggagagctccaactggcaggtggcctttagagacgaagcttccagaggaaagaacaggcagcaatctttgctgttctgcagcctctgctggtgatacccaggcaaacagggtctggagtggacctccagcaaactccagcagacctgcagcagaggggcctgttagaagtaaaactaaccaacagaaaggaatagcatgtccactcagagaccccatccaaaggtcaccaacatcaaagaccaaagttagataaatccaccaagtttggaagaaaccagtccaaaaaggctgagaattccaaaaaccagaacacctcttctcctccaaaggaacacaactcctaaacagcaagggagcaaaactggacagagaatgagcttgatgaactgacataagtaggcttcagaaggtgggtaataacaaacttctccgagctaaaggagcatgttctaacccaatgcaaggaagctaagaaccttgagaaaaggttagacgaattgctaactagaatatccagtttagagaagaacatagatgacctgatggagctgaaaaacatagcacgagaactttgtgaagcatacacagtatcaatagccgaattgatcaattggaagtaaagatatcagagattgaagatcaacttaatgaaataaagctagaagacaatattacagaaaaaagaatgaaagggaatgaacaaagcctccaagaaatatggaactatgtgaaaagaccaaatctacgtttgattggtgtgcctgaaagtgacggggagaatggaaccaagttggaaaacactcttcaggttatcatccaggagaacttccccagcctagcaagacaggccaacattcaaattcaggaaatgcagagaccaccacaaagatactcctcaagcagagcaaacacaagacacataattgtcacattcaaccaaggttgaagtgaagtaaaaaatgttaagggcagccagagagaaaagttgggttacccacaaagggaagcccatcagactaacagcatatctctctgcagaaaccctacaagccagaagagagtaggggctaatattctacattcttaaagaaaataattttcaacccagaatttcatatccagccaaactaagcttcataagcaagggagaaataaaatcctttacagacaagcaaatgctgagagattttatcaccaccaggcctgccttacaggagctcctgcaagaagcactaaacaaggaaaggaacacccagtaccagccactgcaaaaacataccaaattgtaaagaccattgacactatgaagacattgcatcaactaatgggcaaactaaccagctagcatcataatgacaggatcaaattcacacataacaatattaactttaaatgtaaatgggctaaatgccccaattaaaagacacagactggcaaattggataaagagtcaagacctatcagtctgctgtattcaggagacccatctcacatacaaagacacacataggctcaaaataaagggatggaggaatatttaccaagtaaatggaaagcaaaaaaagagcaggagttgcaatcctaatctctaataaaacagactttaaaccaacaaagatcaaaagagacaaagaggggcattacataatggtaaagggatcaatgcaacaagaagagctaactgtcctaaacgtatatgcacccaatacaggaacacccagatgcataaagcaagttcttagaaacctacaaagagacttagactcccacacaataatagtgggaaactttaacatccaactgtcaaaattagacagatcaatgagacagaaaattaacaaggatattcaggacttgaactcagctctggaccaagcagacctaattagacatctacagaactctccacccaaatcaacagaatatacatgcttctcagcacctcatcgcacttattctaaaattgaccacataaatggaatgaaaacactcctcagcaaatgcaaaagaatggaaatcctaataaacagtctctcagacaacactgcaatcaaattaggactcaggattaagaaacttactcaaaaccacacaattacatagaaactgaataacctgctcctgagtgactactgggtaaataatgaaatgaaggcagaaataaagatggtcttggaaaccaatgagaacaaagacacaatgtaccagaatctctgggacaaattgaaagcagtgtggagagggaaatttatagcactaaatgcccacaagagaaagcaggaaagatctaaaatcgacaccctaacatcacaattaaaagaactagagaagcaagagcaaacaaattcaaaagctagcagaagacaagaaataactatgatcaaagcagaactgaaggagatagagacacgaaaaactcttcaaataaatcaatgaatccaggatctggtttttttgaaaagatcagcaaaatagataaactactagccagactaataaagcagaaaagagaagaatcaaatagacacacaaaaaaaattatacaggggatatcaccacggatctcaaagaaatataagttaccatcagagaatactataaacagctctacgcaaataataaagtagaaaatctagaagaaatggataaattgctggacacatacaccctcccaagtctaaactaggaagaagccaaatccctgaatagatcaataacaagttctgaaattgaggcaataattaatagcctacccaccaaaaaatgtccaggaccagatggattcacaagtgaattctaccagaggtaaaaagaggagctggtaccattccttctgaaactattccaaacagtagaaaaagagggaatcctccgtaactcattttatgaggccagtatcatccttataccaaaacctgacagagacaaaacaaaaaaatgaaaatttcaggccaatattactgatgaacatcgaggtgaaaatcctcaatagaatactggcaaaccgaatccagcagcacatcaaaaagcttatccaccatgaccaagtgagcttcatccctgagatgcaagactggttcaacatacacaaatcaataaatgtaatccattacataaacagaaccaatgacagaaaccacatgattatctcaatagatgcagaaaaagcctttgacaaaattcaacaccccttcgtgctaaaaaactgttaataaactgggtattgacggaaagtatctcaaaataataagagctatttatgacaaacccacagccaatatcattctgaatgggcaaaaactggaagcattccctttgaaaactggcataatacaagaatgccctcactcaccactcctattcaacatagtattggaagtcctggccagggcaatcaggcaagaaaagaaataagggtattcaaataggaagagaggaagtccaattgtctctgtttacagatgacatgattgtatctttggaaaaccccatcttctcagcccaaaatctccttaagctgataagcaacttctgcaaagtctcaggatacaaaattaatgtgcaaaaatcacaagaattcttatacaccaataacagacaaacagccaaatcatgagtgaactcccattcacaattgcttcaaagagaattaaatacctgggaatacaacttacaagggatgtaaaggacctcttcaaggagaactacaaaccactgctcaaggaaataagagaggacacaaacaaatggaaaaacatcccatgctcatggataggaagaatcaatatcatgaaaatggccatactgcccaaagtaatttatagattcaatgctatccccatcaatcttgactttcttcaccaaattggaaaaaactactttaaacttcatatggaaccaaaaaagagcccacatagccaagataaccctaagcaaaaagaataaagctggaggcatcaggctacctgacttcaaactatactacaaggctacagtaaccaaaacagcatggtactggtaccaaaacagagatatagaccaatggaacagaacagaggcctcagaaataataccacacatctacaaccctctgatctgtgacaaacctgacacaaacaagcaatggggaaaggattccctatttaataaatggtgctgggaaaactggctagccatatatgtagaaaactgaaactggaccccttccttacaccttatacaaatattaactccagatggattaaagagttaaacataagacctaaaaccataaaaaccctagaagaaaacctaggcgataccattcaggacataggcatgggcaaagacttcatgtctaaaacaccaaaagcaatggaaacaaaagccaaaattgacaaatgggatctaattaaactaaagagctcctgcacagcaaaagaaactatcatcagagtgaacaggcagcctacagaatgggagaaaatttttgcaatctatccatctgacaaagggctaatatccagaatctacaaagaatttccacaaatttacaagaaaaaaaaaccatcaaaaagtagacaaaggatatgaacagacacttctcaaaagaatacatctatgcagacaacaaacatatgaataaatgctcatcatcactggtcattagagaaatacaaatcaaaaccacaatgagataccatctcacaccagttagaatggtaatcattaaaaagtcaggaaacaacagatgctggagaggatgtggagaaataggaacacttttacactgttggtgggagtgtaaattagttcaaccattgtggaagacagtgtggcgattcctcaaggatctagaacaagaaataccatttaacccagcaatcccattactggatatatacccaaaggattataaatcattccactataaagacacatgcacacgtatgtttattgtggcactattcaccataacaaagacttggaaccaacccaaatgtccatcagtgatagactggttaaagaaaatgtgacacatatacaccatggaatactacgcagccacaaaaaaaggatgagttcatgtcctttgcaggcacatggatgaagctggaaaccatcattctcaacaaactaacacaagaacagaaaaccaaacatcacatgttctcactcataacttggagttgaacaatgagaacacatggacacaaggagggaaacatcacacactggggcctgttagggggtagggggctaggggagggatagcattaggagaaatacctaatgtaggtgtcaggttgatgggtgcaccaaaccaccatggcacatgtatacctatgtaacaatactgcacattctgtacatgtatcccagaacttaaagtgtaataagaaaaaaaatagggacattatcctaattatacagatgggtccaatggaaccacaggggttcttaaaactgggagagggaattagacaaaaaggaccagagaaatggcagcatgagaactgaacccactactgctgactttgaagatggaggaagaggccatgcgacagggaaggtgagcagcctctagaacccagaaacggcaagaaaacggattatcccctagagcctccagaaatgagttccattctgctgacaccttgattttatcccagggagatgagtcttgaacttttgaaccacaaactgcatgataataaatttttgtacctttgcagcactgaaaaaaaaaaaagttctacatattgaatgtgtgaatgtcaatattctaggtgtggattttatactatagattttcaagttgttaccactgggagaaactgggtaaaaagtacaaggaatctctctgtgctgtttcttacagcttcctgtgagtctaaaattatctcaaaataaaacatttaatttgaaaagaaaaagaaaaaaatacaagaacagaattcaaagctgaaagacaatgtaaaaaggattaaaatttatgtacttgagtaatttatgtaactgagaagaaatgtctgaatagcctagaatgttccaaaaattaatgatggacagcaaaccatagatccaagaagctcagaaaccatcaagcattagaatacacaaagcaaacaagtaaggaaacaaatactaggcatattcaaactgcggaaaaccaaagatccaaagacaaacaggaaaactgaaaaaatatattacatataggaatattgacaagagttagaggagcctacttttgggatgctctgcaaaccagaaaacaatgaaatgatatctttagagtgctgggggaaaaaactccgtgtccaccccaaattttataattggtgaaaaactcttccaaaattagaaaaaaagttatgagggagaaaacaaaaattttctctaagaaaaattaagaaactgtattaccaacagagctgcactacataagatgttaaaggaagttccttaggcataaagaatatgatcacagaaagaagcttgaatgttaaaatgaagagcactggaaacagaataaatgaaagtaaatatttttattttaattgttataaaagataaccgatgtctataggaaaacataacaatatattgtatgttttagaatacataaaagtaaaatatgacaataataccaaggatgggagggaggaattgaaagtatattgttgtgaggtccttatattatatataaagtggtatgtattatttgaagggactctgattaattaaaaatctatattgtaaagtctagggcaacaactcaaaccactaaaaattttaaataatgcataaagaatgagctgaggatagagacagaaatggaataatgaacaatatactaaatctaaatgaagggagaaaaaccttaaaaagaaacaacaaatagatgaggaaaaatggaagagagtcctcaaaatagtacattttaatctaatcatgtcattaatacattaaacataattggtgtaaacatacataaaagaaaaagattgacagattggataaaaaagcgaggcccaactatgcatggtccacaaaaaagccactttaaatataaataggctaaaaatgaaaagattctaaaaatttattatgctaccacttgtcgaaagaaagttggaatagctataacagtatcaaaatagacttcagaaaagtgactagactattaccagaaataaagagcaacattacatgatgataaaagggtcatttctccaagaatccataataatcctaaatgtatatgcatctaaaaagagagctttaaaatatataaagcaaaaacaaataatagtataaggagaaataaacaaacccacaattataactgaagacttcaccattcagtttatagtaattgatagcaagtagagagaaaatcagtaaggatatagaaaacttgaaaacactgtcaacaacttgacctaaccaatgtttatagaacactgtatcccaaaacagtacaacagatattatatttaagcacatatggaacatatctcaagagagccaatattgttggtcataaaatgttatacatttcaaaaattgaaattataaaaagtaagtacttataatgaatacaatctgtgaatatatgaataaaaaactagaaatcaataaaaaaatctggacaatatcccatatattgattgtgtgaagaggaaatcttagggaaattgaatattttgatttgagtgaagataaaaatagagcatatcaaaaattttggttgcaactaaagcagtgccttgaaagaagtttataacacaagatgcttatgttaggatgaaggtctcaataataaaataaaaatctagttcttgaacaaattaacactgttgacaaacatatagccagactgaccaaagaaaaaggagagaagacacaaatcataaatatcaggaatacaagaagggacatcactacagaccctaaggacattataaaaataagaggagaaaccatgaataactctatggccataactttgatgatttagatgaaacagataaattttttcaaagacatcaactactaaatctgtgtgtgtgtgtgtgtgtgtgtgtgtatgtgtataaaacttaagtcttctgaaggaactgaatatgtagtaaatacttcctattaaaaaatactccaggttcagatggtttcactgatgaattctaaatatttaaggaagaaacagtaacaattctccacaaactcttccagaatattaaaaaaaaaaagtaaaacactttccaactcatcttatgatgccagcatttcccaaataccaaaatgagacaaacacattataagaaagatgagtatctgtcataaacatggatgggaagttctcaataacatactagcaaattaaatgcaacaatgtataaaaaatgatcaagtagagtttatctcaggaatgcaaggctagttcagtattgaacaatcagtgtaaaatactgtatcaaaagactaaagaagcaaacccgtaaaattatcacattgagttcaaataaagactctggcaaaattcaacattcatttctggtattctcagaaaactagagttaaaaggaatctttgttgacctgataaagagcgtctgcgtaaaacctacagctagcattatatttaatagaaaaagactaaatgctttccccttaaggtcagcaacaacgttctcactaatcctattgcacattgtactggaagtcatagctagtgtagtaaggcaagaaaaagaaataaaaggcatagacttggaaaggatgaaataaaactctctctatttgcagatgacatgattatgtaaaaattcccaaagaatctattaaaaagttactaaaactaagtatgtttagaacagttttatgatataagatcagtatacaaaaattaatgtttctgtatgtagaaatgttatgttttctatatacagtgtttctatagacaaaaatcaatgttcccatccaatagcatgagcaattagaaatttaaaagacagtattatttacaataatatcaaaactatgaaatatttaggtatgaatcttacaaagtatgtaaagaactacaaagcactcatcaaatgaattttaaaaagactttaaaatggagatattatattgtatttgtcatttagaaaatgctatattgttataatgttacttaccctcaaactgagcaataggttcaatgcaattccaactaaaatcccctcaggactttcacaaaaattgacaaatggattctaacatttatttagaaagggcaaagaattagaacagctacaacaattttgaaatagaagaagaaaggcagaggactcatactacctgattttctgacctactatactaagtttagacagtgtcatactatagaaagaataggcatatggaccaatgaaagcaaatagagtccagaaatagaccaacacatatatggccaattgatttttaacaaaggtgcaaagccgattaattttcaacaagtgttactagaacaattggatatacatatgcaagaaaatgatctagattcatactttatgcaaaaatcgattcaaaatggaccatagacttaaatataagtactaaaactatataatttccagaagaaaacaaagagaaaaatatttgtgatcatggcttaggcaaagatttcttagcttaaaattttcaaaacatgatctataagggaaaggatggatacattgaattttatcaaaattaagtactgtttgttggaataaattgctgagaaaatgaaaataaaagccaaaggttgagcagcaatatttgtaaatcacatctctagtcaagggtttgtatccagaatatgtaagattctccaactcaatgaaactctcaaaatttaataggaaaagagacagtccaataaaactgtgccaaatatgtgaacagacacatcccacatagacagcaagtcagtatataaataccttcaacaaaattagtcattaaagaaatgcaaattaaaaccacaatgtggcaccaatgcacagctattagaataactaaaatattcaaaacataaaaaaattaaaataccaagttccagcaagtatacaaagcaacttaaactcacatatacctgctggtggaaatggaaatggtgcagacacactggaaaagtttggcaaattcttaagaagttaaacatatacttactgtatgacccagcaatctcactgctttgcatttactcaagtgaaatgaaaactacatcctcacgaaaatatgcacatgaatgtttgcagcagctttatctgtcatcaccaggaactaaaaactacccaaatgtttctcaactggagaatggataaacaaactggtacattccatacaataaaatccttactcagcaataaaaagaaacaaactactgttttgcacaacagcatgaatggatctcacatgcattatgctagctgaaagaagcaggataccaagggctacctactccatgactcagtttatacgacattcttaagaaagccaaactacaggaagaaaaacagattagtggttgccaagggctgcggtttgaagaggggatggttacaaaagaggcatgggggaattttaggggccgatggcactgttgtgtatcttgattgtggtggtggttacataactgtatttcaaaattctaagaactgtgtgcttaaaagggtgaaatttactatatgtcaattgtacctcaatataaatggaaaataaaattttcttaaaacctgtggttttctaatggtaatggatttaaaaactgtcactcacctaaacattagttttgaatacatgaactgtttagcaatgcagagcctctgttggttctgaattacccagcacagaattttagaaaaggcttcctgtgagtccgtgattcccatggagaaaatgaaaccagtaacaggacaaaaggtggctggtttttagcattctcttgcactaagcttgagtaacctcagtgaatatcgacgagctgctcttataaattactccatgtttcttccacagctcttgctgtcattttaatataagaactttttaatatatagaatctttgtttttctgagtcataaaaataactctagaaaaagcatctgaagtgttcctgttagtgcttataaaattgtggcattctataaaaatttcttcaagtgtatggcatgctgtgaaaaaaacctaaaattatttgagaaggggaaattgaagccatctctcttataaaaattaaggtagggtttttttaggtaaatagactttgatgtattcactattacattatctgtatttgtactaatataatgtatcaacaatagaaaaatcacactaccttttcatctaaatgttcaggcataggctacttactggttgtattatctttttattaatttacaaattaaaaaggtcatttggaatcaggaagtgaagtctactgaattgctaaaaactgagtgaagagaaatgtttaatgccaggaagaagaaaagaaagcgaactgtgagcaaagggtaacaacacacaaataagaagtctttaaaaactcactttcccttcttggcttcacctttactcttgagcttggtaagcaacactgataatgataacatcatgatcaatcagcttgattgatgaattcctctgggactccccactttccatctctgacccctgctcaactttaagaacagtctcttagaaacacagaaaactttcctatgtacttttaagtaaattggcaaatgacagggtgtggtggctcacgcctgtaatcccaacactttgggaggccaaggcgagtggatcacttgaggccaggagttcgagaccagcctggccaatgtggcaaaaccctgtctctactaaaaatacaaaaattagctgggtgtggtgctggtgtgcgcctataatcccagctactcaggaggctgaggcaagagaatcacttaaacccaggaggcggaggttgcagtgacacaagatcatgccactgtactccaacctgggcaacagggcgagacagaaaagtggacttttcaatgctccttttatgagacttcctgttggatgggccatgttgctgtcttcttgaaattgtcctccatttttaaaaattaaaaaaaagttcttatcatctatgacactgaatctttgcattcatctcctatccttttcattagttcttctttgtctcttgttgtgggttcttaaatactgagttcttccctcagataatggtgttccctgggatttcattcccttattcaacatatatttatcaaacatccacgacatactaggtactggaaatacagcagtcagtaagacaaacaaggtcattgtcctcaatgagggacatatattaatagacaaatgtgctaataacatcctgaagagcctacctattcttcctgaggaaactgtctactcttgaagtgacagcctttatttctgtgagatggttctcaagtttatgtcaccatctctgatccctgccttgaactcctagatcagagtcaccaacccacccagggggatacagagcatagcggctgagggtgtggatcctggagctgctctgtgttcacattctagtaccatcctttactaagcatttggtgttaactgctctgggcctcagttgcaccatgtgttagctgtgggctaataatagttttaatatctacctaacatagttgttctgagggctcagtgagttaatacatagaaaacttataaaacagtaagagcccaaattcttgtttactctttctactatcattaatattcatatcactgtttagagttcccaaatgtactacaactcaccatggctgcatcagattctctatgtccattgttcactcaagccacccacttaagaaacccaggagtcagctttgtctctttccattctctttatttatttatttatttttgagacagggtttcactctgtcacccaggctggagtacagtggcgcaatctcagctcacttcaacctctgcctcccaggttcaagtgatcctcctgcctcagcctcctgaatagctgggaccacaggcacgtgccaccacacccagctaatttttgtatttttagaagagatggggtttcaccatgttggccaggttggtctcaaacccctgacctcaagtgatcctcccgcctcagcctcccaaagtgctgggattacaggcatgagccacgcacctaacctgttttcattctctatccccacatacccattcattccccaggtgctaccacaattacctcgtgtgtctgtggtttgggacttcattatctcttccacactctgcttctagtttcttttctttctaattcagcttcagagaaattgagtaatgttatttcacttaataccccaagctgacttatggtgtgagggccaacccagcctgcagaaattttggtttgtttaataatattttaaaaaaaaaataaaatttgaggctgggtgtggtggctcccagcctgcagaaattttggtttgtttaataatattttttaaaaaaataaaatttgaggctgggtgtggtggctcatacctgtaatcccaacattttgggaggccaaggtgggcagatcacttaaggccaggaatcaagaccagcctggtcaacacggcaaaactccatctctactaaaaatataaaaattagccaggcgtggtggcgggagcctgtagtctcagctacttgagaggctgaggcatgagaatcgctacttgagaggctgaggcatgagaatcgcttgaacctggcaggggaggttgtagtgagccaagatcgtgccactgcattccagcctgggcaacagatcaagactctgactcaaaaaaaaaggaaaaaaaaaaggaaagaaataaaatataaaatttgaatgtcgtcatttggggcatatgcttcctggttcagtatcagccccctctagtcatgtgtttacattgtatgtttgttctggtccctgaggcagctacatttctgagtcctaagataaaggacaatcacccactccttaatgtactagtccttgccatctggagctgaccactcaccaggactttccctcctcggggtttatatttctgatatttctcacctcccgacctttatttatgctgtttttctgctgggaatgtcctcctgactctgccagttgaaactataaatacggttttaagatccttcaagatttgtttgaaattttaccacttccatgaggtgatttcatatccacttaattcaccagtcattcaccaatcaaactattagctattttaatcacagaatacttggcaaaagcctatctatggactctctccttagaaacacacagctctagcagggtgcagtggctcatctctgtaatcccagcactttgagatgctgaggtaggtggatcatttgaggtcaggagttcaagaccagcctggccagtatggtgaaatcccacctttactaaaaatacaaaaaaagaaaaaagaaaaaaagaaaaaaacatagctggcgtcgtggcaggtgcctgtagttccagctacttgtgaggctgaggcaggagaatcgcttgaacctaggagatggaggttgcagtgagcggagatggcaccactgtactccagcctgggcaaccaagggagactctgtctcaaaaagagagagagaaaaaaaaaaaagaggccaggcacggtggctcatgcctgtaatcccaatactttgggaggccgaggcaggcagatcacttgaggtcaggagttcaagagcagcctggccaacatggtgaaaccccatctctactaaaaatcagccaacatggtggtgggtgcctgcaattccagctacttgagaggctgaggcaggagaatcgcttgaacatgggaggcagaggtacactcctgcctgggtaacatagagggactctgtcagacagagagacagagagatagagacagagagagagagagagagagagagagagagaaagacacagctctacaccttacagcatttgtactccacgcatgatccagaggttaaaaatcctttctagggaaacattagtgtaaagaagtggatagctataggttcttagaaaacagccatcctatttaacgatttcccattcagtccttttcttagcattggcaacacatcttagaatatataaagtatatgtgctgatataggacaaaattaagtggaaaaataggcagttgtagaatatgtacgttgctcccatttggaaatatacaaaggggaatattttgtacaggccacatgtaagtcagataaatgtctgctcttatctatgtagactatttgagaaggttcatcaaaaagccattaagaaggatttcttttagaaaggcaaacagagaagtcacctcttaaccatcctaccatagaaggcttttctcttttatacagcacatatcattttacttttcaaaaccttttacagcagatagttctggagtacaggtggcatttatgctccccacaaaagaaaaagccttaagctgtcctctgaggagatgaagtcttcatgaagaggaggccaaaacctttctgctgttcctctctctcccctctgtgtcatagatcccagctggcaaggaatatgctgctgtccttgtgatccaggcttctggtcagacttgaggacagtgagcactcagtgactttgttgaatgaatatatgagtggatgagctgtcaatgaatgggatgtgaaatagatgttatatatattaatataaagaacctaagaaagatcaaatctggaagtggagatgcaagattattgaggaactcacaaaatgtcagaggcagcaggtggatttctgtaaactacatatctagtcctccttaaaagcagaattctgattcattctaggggaggctgctcctgtacctgccttggcattgctcagtcatagctttccccttcccttctccaaaatttctgcagaggccccacttccagaatgaggtcagaggaaggagagatgttgctactgagagcttgcttgcttcatgtgagcctgtggaggctgagaactacaggataagtttgcaaactcacaaaacagacgtaaaaacacattctgaaaatatcctctttagggaatagaaggaattaaaactgcctgaggaagaggaggaggtcaagaccagtccccaaagcacccatctatctgattaagaaagacaagacgcggacttttcaaagtattcaatggagtcagaaatcagatcaatgatagaggagtttcagtggaaaagtaggaggagtggagaaccagggacaaggagtcaaattttggatgccccttacagaagatgcagtcggagaggaagatggaaaatgtcatcgggagcctggcattttacagcgggtggttgcatttggagtctgtccaatgggaccttgaaaggaaactccctgcaggattgtaattccaaaccaagcaggttctgaccatagcagtgaaaggagaacttaggctgtgttgcgtcttcagatctggatctacaaagacaagtcatctctgtgagaaaggaaggagccagctgttcagggtgggcagtgctgatagcactacccaagcctcagagacacagggcagctcctcacccagcacagagccaaggccttagtggaatgttcacagaaaccacagagggacttggaattgtgcttctctcctgaccacaagggctccacagctgaccttcaattctggtggatcattaaatacaggaaaagaagatgacaggaaaagatgccatcacctgtgagctgtggctcctcttggaggctccctctggaactaacaggaaggaagcatgttccccagtgatcaggtctatgcagcccatcctctaaggccaagggggctgagaggctaaagaaaaaggctgacaaacccagtttctctgaaaaaaaaaaaatttaacgatgtagcaacagaaactatgtctcagttggccccatggtggcgggtccttgcaccaccttccagaaaatatcttttattgatttatttattcatttttggacacaggttcttgctcttttactcaagctggagtgcggtggtgtgatcctggcccactgcaacctcaaccccctgggctaaagcgatcctcccatttctgccacctgagtagctgagactacaagtacatgccaccatgcctggctaatttttgtatttttagtagagaaggctactaaacccaggctggtctcgaactcctggactcaagtgatccacctgcctcagcctccccaagtattgggattacaggcatgagccacagtgcccagcctcagaaagtatcccttacatagcaaggttttgggatataatatgttcagctgaaagcagcaggaactctcagactttcttgcaaaaacttgtaaccactgtggaggttagataagcatctttatgaggggttatctatgtaggattatctatgatatgggcattgtttgaagatcttgctgcaaaagaccttgtgccgaacacgttggtgtgcaggagtcaaacattggtcctcatggtggttttacttcaagatggcatcatgctggccatggaataggttgttttcctgcaatgcagaagcacacgtaggggctgtacctctaggtactgcttgccaggaaggcgagaaaagacccaggagtcatcagcttccacttttcctagttgcaagagatcctaagatcctaagttgcaggagaatcacacctacagaagagtctcttcagacagaaatcttccctgccaatggcctctgtagcatccctggccaagcggcaagcagaggccagatgctccatctgtctggactacctgagacacccaatgaccactgattgcaggcactacatctgaggtgcctgcatccaccaatgctggtaagaattacaggacatctctccctgtcctgtctgcctccagcactgtcctgacaagaacctcaagaggaacttccagttatgccacatgaccgatattgctaagcagcttctcaccactgcaaggcgcaaaaggaaactgcagggagaggagcccgtgtgcaggaagtcagatgtggccctgttctgtgagaaggatcctgagctactgtgtcaccagtatagggtctccctcgaccactgagatcacccccgatgcccattgaacaagctgcagctaagcacaggaagcagttcgagagctacattgaacccttggaaaagcaagttgaagacgctgccatggggtgtgaaatgcacatctaagaatcttttgcagtgaccaggaaggaggaaaagcagaggagaaatttattttctgaattggaacaatataagcatttctcaagaatgaaacaagttgcaattcatggcaggctactaattgaaaaagaaaaattaaaaaaaaaacctaactgaaaacaaaagcagaaattgagaccatattttcaccttagaaaaatctgctttgtgaaataacacagtagtatttgcaggcagacctggggttactgacaagttttgaaagtgtccataataagcatgaaaacctgaaaacccttgcagtgttgtcacatgaatcaaacaatgagattttcagtgtccctctccagcattcaggtctgcaaaaagtgacagcatgcttgagtcagatttgacagtaggtcctaagactgcctaccctaaatttattagcatgaaaaatagaaaaagtaggaaatttgagatagggagaccaaactttgctcataatatcaaaccatttagttcttacacagttgtggcccctgagaggtttaatcctggcaggtaggagtaagaggcacaggtgtgtggtccttcagtgtgtgtaaagactctttccccagagatgctcatacagcaccatccccaagaaaaagatggtaattccagcaatggagtaattgttggaggatatgggatgtagccccacgtgagcagattggcctttctccagaccaccagttgagagaagtttcattttataatttgcatgctggatcatatttgttaactgttgctgatatgtttacagaaaaatatgtgctttatttccgcattggacctttataaaatctcttgcaattactatagtcagtgatggatagtattctacctgaaaaactattttgtatcatatattttcttccagtgttcttcgaggggatttctaataaagaatgtgactctgaaaaaaaaaatcccttctaatctaatgcaatatttcccttacttgaatcctacagaatgttggtgctatttcccctaagctgcttatcagattctgctttgttttataactcattttatgcttgtttttttaatctcctttcccaactgccatcactcttgcatcccccaaccacccatgcacacccatatatttcagggatcaggacatgctcattgtttatcctgcttcttaatacagtgccttgtatgtgagagatgctcagtatttaattattggattaaattatttataaatctgggataccagtctacgaactaagcagtcgtcacctttttataaaaattgcattgcttgtaagattggcaaaattatcatttgataattatacgtggtatgcacacattgttctggtaatgtttggttaccagactgctttctgtgctataactaccctcagacatctaattcatttaaattattgatgacagccatgtcttagtaacccataagcatgtggaaagaactgaataattaaactttcattttcaatccaaatgagaattttcaaatgggcaaacaaagcatctggccttttcttttctttttcccccacattcagtggcattactttcatttctcccatcaggtgatacttaaggagcagctttctctgccattggtatttagtgtctctgtggctttgatgcatgtttgaagatgctctcagcccaggtttatgatcaatgggatcctattgccctgctgctcatggtacacttggctgtactttataggatggttctccccaaagaatcttgcaagttcgaaccacactgggctggctaatggaaaatcttcaacacatttccccctacaagattgctggaaacatttccaccccatcagattgccaatctggttccaaataggatatccctaaaacgtgttattattgtggctgttttttaagacaatattggttgtgccacaggtagcgactatctggagctagtagcatgggaggaaaaaagaatttaccaagacggttttaggtaaagaaaggcagatttattagagaaagtaggaaagtatgttgcaaggaagcagtgggcaggccagcaagagaagagctgagcgcaaagagataaagggttactggggattttataggatggtacttgtgctgtgtgctggagagggcttcgtacagtaatgataatgccaaagttacagtgagctaacttgcattttccaatcagctgagtgtctgatgatagctgggtataggaagattgtgagttatttgcccaggagggctatgtgtcctggaccatgaagaaaggcagattcgtagcttatctcctttttctttctgttttcccctgctgctgccagactgacttctttttcctcattaggactccacaggttatattcatggggaaacaatagtaaactatttgcataagttttctcagccccacacacctatccctgttcaagcccagtgaaatgttctgtattttatagccttcaaccagccatttgccaagcagctattggactgtctcccatcccggatacttaagatgacttccttccattaactgaaacattgatttgagacaatcactttgcaagtacattgatccctttaatgggaaattgttacataaggttcccagatttcacatcttaccctgtttttgaatattgacactttctaaagcattcccacgtgaagtttgaaagagaggttggttggatgtgtattgaaaggagtcagatgcactacagaaacacacacctggtaccatagcctcagcagagtagtgctttgggtgttttgtgggagtttagctctagaaattaacaaaaggattagacaaggattcagttcatctcggttgtatttccatattcatgcccatactgtgaggttagaatatcaatttctcaaacgacgttggaacaccttgagcagctgctccattcaaagcactatggggagggtatggtgaatactaaaatgaaaaatacgaccagtctacaagcaacaggtgtaagtcaagagtatattacgatacagcacaaaggtcgatgtcacctttataaaattctaactgaatgttttgcttatggaaggcagaatggaagtgccttggagtgttcacacctgattcaaattcatgggaacagccataggagaatgaggttgagcgacatggtgaacaaactatcagttagttactcatgaagccagaatggaaaatgcaggttagatgtgtggtcaaagttgtgcctcctacttctattttcagaaatgaacttgccaaagttaaaggagtcacagctgcaaatctgcaggttgtgtatgtccccacggagggtagggacaaaacagtcaaagaccaggctgctctttcctccctcgccctcccaccccgaggaacaagttcagggaaacaggctgctctaaagaaggagagccaatgctctgcatgctaaattcattccttcgtctcgctagggaggtcaatcttcctgccacaggaggcgtaagtcagtgagaagtagaaaggaggaggaagttatgttttttaatgcttccaaaagggtagaagtacttaatctttgggccaaagccctgggcaaagtagaaaccctgggagagtgagagggtggatctcaaagtcatgatggagataaggaggaccaagttacaatatgaactgagattcaatcatgaccctggattgtatttgggacagccttgttaactattttcatgccaatggcccatcctattacaagtgaagataactttatacctccagtatctttccatcaataatcctatgaggcctctctgcatttgttttcctagcatccaatgctgaaaaatggaaaacaggtagatgggcaagtttcctcttgaaattagaaagagaaggaagggaaatctgtttgagtcaggcagcagcagagaatggcaagtgcatttgtaattttcatatgcagggtgcagcaggtcactgcatgtccgtgacccttttcctggagagtgtaggtgtggcagaaggtatggcagaagtgtgcactccagctcttgtgcctcagcataactcctgatgtctggtcagttataatattgctgctgttaataattgcaaatgctgttactctacatagcagatattgtcctaagctgattatacatatatatatatttatgtgcagatataaatgtctgtatatgtacgtatgcatatatatacatatgtctgtatacacacacaaacaataaattatttaattatcccaacaaccgtatgcatttcattactaccccactttacagaaatgctaaggaatttgtcagttacaaacacaaaagattaagggacttgtctaaagtcaagaaggctggagagctggaaatcaatcctgagtccttgctctatccactaagacacataaaactttctggatgggcagcgattgcactcagggttgcaggctagcccagtggtcgtccagaccagaggagaaacactgtcttctttcatcattctgcaatgtttctggaacttcacagacagggaagctatgagaaccaatggtgctgggaatctagatgtcaggtttcctttcaaaaagctagacttgcccttgttgctcccactgctgtggcgtatgtgtgggaaaagcagtgctgctagggagggcattgttgaggaggagaagtccagcgagcaatgctctaaatcacaaaggaatgaatcagaagcaacacacagaagtaaaaacatttctctggggcaagaggaagatcccccttttctgaacatttttacagcgtttctctacttcagggtttctcctagactctgaagactaaatgtgttttatgaattataatctacaaatggaaacccactaaattccatccacttgtccatgcctcccattatttgatgacttggctgtaaaggaaagtagcctgagatttatacttttaaaaattttctttttctaattatttattaaaaaaaaaaaaaaactgaaggctacatcacccagtcttccccagtcagcttcctatccaagggctaaccaggcctgaccctgcttagcttcagagataaggcatgttcagcatagtatggctgtaggcaaattttccattaggaaatatttgttctacctattatttcatctcttcctaaataaaaacaagcttaatggctaatatgcacatttctgttaatatcctctgcctaagtggggtgggatgtttattttacaaacctgaaagggaaatacagtcactcaggtcttgcccagtgttttgtcaaaagaatagattcttcgagggatttgaaaagggaatcaaatacaacccactgaaactggaatgacctcaacttcctcactgctcattaagaagctaagacgacagaaagcaggaaggtcaggaggagccacgatggcattttggcataattttcaactgtcttaaaaaagtatgatgaaattaaagtactgcaagaaataactgatatgcatttccaatttgtttcatctcatttcactctcaggccccattcctttaagattcctcccattaatattctccagttactctactcaaggttttatctgttgattttcctttgcctagataaagccaagaattgttgtgtgaattccttctagctagaattcaaagatgccaaatgaataattgtcccttagagagtttttagatccttataaaagatgaagcattgactacagtgaaagggaggaagaaaggaaaggagggagggaaggaagaaagaaggaaaggaagaatgaagggacattattctgtgatcttgcaagtcacttccccttttgtcatctcagtgttaccagtggagggtgtccaggttcttggtgttttgaacaaagaattggacaaaatgcgcaaacaaagcaatgaaagaaaaatgacagatttattgaaacaaaagtatactccacaaagtgggagcaggctcaagcaagcagctcaagagtgctggttacagaattttctggggtgtaaataccctctagaggtttcccattggttatatgtttacaccctacataaatgaaatagtggcccacaaccagtctgattggttgcctcctgtgaccagtcagaggctaaagtgaagttacaaaattataccctatgcaaatgtctgattggttggggagggtgaccaatcagaggctgaagtgaagtcacaaagttatacccctatgcaaatgaagactaggcccctgaccagcgtgattggttgcgggaggggaccagtcagaggtactttccatttctcttgtgtgatgcagagaaaaggtgtggggtgtgggcggtgtgcgggggtgggaagagaggggggagtgggaggggtggctgcaaagggaatagcctctgatccttttgttacttgggtgtggagtggtggggttttccttttgattcaaatcagtcttaggttcccttcctccagaccctattctgctgcctcatcagtatccttaattttgaaataaagttgaactaactgttctctaagattctaacatcctcccctgtctcttcaattagtcatgttccttctggcaggcattatgattcccatgtggtagacatggaaaataagacatcaagaagttaagtggtataaaccacccactgtgggaatgaaggggcgggagagtaagcacatttctgagcaggaggctgctttcagctcccaagattcaattcttgattttctatcccccgtaacaaaaatttcaccttgagggcagaaacaaaatcaacttagagctcctagtaattaaatttcctgcagcaactcagaatataaatcagcagctaactggatgcatgtgagctgctcccagttgcaggttcttttgtctttgtcaagaaaattaaagaaatacttgttcacatttctataaaatcatggaaacaacaaactgggcatctgtaaatgataaattgagctttcttgagctaactcatattaattattctgaattacagcaaagaacggtgctaatgtctctcctctctccattctgatgacaacagcatccatcagacacccgcgctggtttccgcatcactaataaaacccaccaaactctgtctctctttatgctgcctctcatgacctagctaaaaatgattccgccccccccccccccccgcaatcactgcattctctttgatgaccacctttcactaattttgacaaaataagaaataaaagtctgggcgtggtggctcatgcctgtaatcacagcactttaggaggctgaggtgggcagatcacctgaggtcatgagttcaagaccatcctggccaagatggtgaaactctatctctactaaaaataaaaaattagccaggcatagtggcgtgctcctgtaccagctactcgggaggctgaggcaggagaattgcttgaacccaggaggcagaggttgcagtgagccgagattgcgctactgcactccagcctgggtgacagaatgagactccatctcaaaaaaaaaaaaaaaaaggaaagaaagaaaaatacttttctggtgtaattacgtgcttctcctaattcttatttttattttgaaacccaaaacacctaggcagaaagaggaggacaagcacatggcaagtaggacctggcccccacccacagggaatgcctagtcttgccagtgcttcacttggcaaataatccttcctgaagatgaaacattaaactcatttttgagtattcttgtatcagctttcttgaagacccttaatctctttgtacctcggttttcttactgtgaaatgggttgtcgtgaggtttaaatgcatgtagacatatgaagccttgagaacagtacctggagcacagcgagcactataattaattagcattgcttctcttgttatcaatcgaccacacagggacaactaacatctccttggattgtatgaaacccaaaccctcccaccaaagtcccccgtacttcaaaatgtcatagtgcaagagagagaacggaaccactgacataacttgagtttttttgctgttgttttttttgagacagagtctcactctgttgccaggctgaagtgcagtggcacaatctcggttcactgcaacctctgcctcccaggttcaagcaattctcctgcctcagcctcccaagtagctgggattacaggcacaagccaccatgcccagctaatttttttgtatttttagtagagatgaggtttcaccatgttggccaggatggtctccatctcttgatctagtgatccgcccacctcggcctcccaaagtgctgggattacaggcgtgagtcaccgcgcccggccataacttgagttttcaataaaatgactatcctgataacagcttcttgacagtggactacagttgttgagaccttaattaagcctctctcagctccatgggttcatcactaacaatatgcccactttgtaaaaaaaaagaaatcgatctcttccaaagaataattagctataaatatccagctttttcaggatgattttcttcaaacggttgaaccattcagtcaatcatttaacttaattttgactgcataaatcaactgtgtgattgaactaggaagtcagagcagcccatcaggatgctctgtggcgtgtggtcggccacagaggctggacagggctgagcaacctatcgccaggcagagggctgatccttggcaagtcctcagataactatttaaaattaaaaaaataatagatgtttgtgagggtatggagaaaagggaatccttatacactgttggtgggaatgtaagttaatacaacctctatggaaacagtgtggagatttctcgaagaactaaaaatagaattaccattcgatccagcaatcccactactgtgtatctacgcatagcaaaagaagtcattatatcaaaaagaaaggtgcctttgtatgtttatcatagcacaattcacagtagcaaagatgtggaatcaaagtattcatcaacaggcctggtgcggtggcttatgcatgtaatcccagcactttgggaggccaaggcgggtggatcacctgaggtcaggagtttgagaccagcctggccaacgtggtgaaaccctgtctctactcaaaatacaaaaatcagctacatgtggtggcgggagcctgtaatcacagctacttgggaggctgaggcaggagaatcacttgaacctgggaggcagaggttgcagtgagccaagatcgctccattgcactccagcctgggcgacagagtgagactccatctcaaaaaaaaaaaaaaagatgttcatcaacagatgattggataaagaaaatgtggtatatatacacaatggaatactatttagccacaaaaaagaatgaaatcatgtcttttatagcaacatggatggaactggaggccactatcttaagtgaaacaactcagaaatgcaaaatcaagcaccacacattatcacttataagtggaagctaaatagtgtgtacacatggacatagagagtagaataattgacattggagattcagaagggtgagagcataggagcgggatgaaggatgagaaattaatgagtacaatgtatactatccaggtgatgatggttacaataaaagtccccacttcaccactgagcaaaatatccacgtgacaaaacagccttgtactccttaagttcatttttaaaaattaagaatttgtcagcaaatcagtcagaccttcagcttcttttccctttaataatctagacatagaaattcatcagcaacccagatctctatattatttttcccattgccagcattttaaaatttgtcataaatctgtcctgaatttcttgctgtgggcgaaaaagctgcaaaacaaaagccagttttgttccattttgtttggttggttttttttccatcatcgacagcagcctgaactaatacgtaaaactagaaataggcttgagtcattctagggtagaggaagatattcagaggaaatgtaattctctttacatctctagagggcagtgcttggcttcttgccttgactccaggtcctaaagctgtaatgtagccacagaatggaatgatgtcagaggttgcaaataaaacctcacagcaatcagcagcttagtttatgcgacaggggaaatggaacactaaatctttgtttagaatagagttattaaaaatcggagaaaatctagacagtacccagggagacggtgcccagttgcatcttgatggtgataaatggttcataaggagagtcttggggtagatacatgctgagaatgttcataaatattcttccctccatctgatcctgcctaaagggacaaacatcactcagaatgatggtgccgttacagaagcgtttttatgttcctcttcccaattttccattagctaatgcggtttgagccaggcactgagctaatatttgcctgtgccttttcatttattcttcacagcaatcttatgaaatataccaatcttcggatggaggaagtgaagagctgaagtgccttgcccgtggtggagctagtctgtctccagagcctgctccataggtgacttgctacatcctaactaggccatattggtctctctctagtttctgtgctccctgggcagggaggagctatcagagttggcatcctggtacccttctgggtgtcagttttcaaaataatagttatccagaataatcacatcctatcatattgaagagcagttgtctttcttcagattggtggagcttgcaatagttgtttttgtttgcttgattttcgtcttcaacagcagcctgaacgtgctgtgactacttcatttaatatcattctacacatcaggagagagtcagcagggagtgtggcaggggcagctgctttgatccacggccactgcctttgcctttcatctgccccagcctcagtagagagggcaaacatccacatgaagattagcagacaaatacttctgagaaacaaggtggatagggaaatagcatggttttttttttttctttctttccttgagacaggatcttgctctgttgcccaggctagagtgcagtagggcaatcactgttcactgcagccttgaactcctgggctcaagggatcctcccacctcagctgaccaagtggctgggattacagatttgtgcctccacaccaagctcattttttatttttttgtaaagacatggtctcacgatattgcccagactgtttttgaacaaacaatcctcccatgcctgactttaaatagcatattctcatgcaagctttgagcagttttccaagcattagtgtttgccacgtgtgagcaaatgacctgaaaacaccacgggtctgacatggagaaaccaaaggaaatcagagagacctgaacatagtaaaagtgaactatggccactgaatttgccttttggactcaaaagtcaaatgattcccttgatatctgctttcgtggaggcctatctctggctctactaggcttgaatagcattgatttcgttatatttatttatattccataagtctttgagcaactggtggtatttgattacacaagttctttagtggtgatttgtgagattttggtgcgctcatcacccaagcagtgtacattgaacccaatttgtagccttttatccctcacccccttcccttcccccatgtctcccaagtccccaaagtctgtcatatcattcttatgcctttgcatcctcatagtttggctcccacatatgagtgagaacatatgatgtttggttttccattcctgagttactccacttagaataataggcccccaatcccatccaggttgctgtgaatgccattaattcattcctttttatggctgagtagtattccaacatatgcatatatatcacagtttctttatccactcgttgattgatgggcatttgggttggctccacatttttgcagttgcagactgtgctgctataaacatggatgtgcaagtattttttcgtataatgatttcttttcctctgggtagataccagtagtgggattgctggatccaatggtagttctacttttaattctttaaggaatctccacactgttttccatagtggttgtactagtttacattccctccagcggtgtagaagcgttccctgttcatcacatccacgccaacatctattatttttttattttttgattatagccattcttgcaggagtaaggtggtatcacattgtggctttggtttgcatttccctgatcattagtgatgttgagcactctttcatatgtttgttggccatttgtatatcttcttttgagaattgtctacccatgtccttagcctacttttttatggggttgtttttttcttgctaatttgagttcattgtagattcttgatattagtccattgtcagatgtatagattgtgaagattttcccccactctgtgagttgtctgtttattctgctgactgttccttttgccatgcaaaagctctttagtttaattaagtcccggctatttatttttgtttttattgcatttgcttttgggtacttgttcatgaaatccttgcctaagccaatgtctagaagggtttttccagtgttatgttctagaatctttgtggtttcaggtcttagagttaagcccttgacccaccttgagttgatttttgtagaaggtgagagataaggatccagtttcattctcctacagtgtcttgccaattatcccagcaccatttgttgaatagcgtgtcctttccccactttatgtttttgtttgcattgtcatagatcagttggctgtaagtatttgggcttatttctgggttctctattctgttccattgggctatgcgcctatttttataccagtaacatgctgttgtggtgactgtggccttatagtatagtttgaaatcaggtaatgtgatgcctccagatttgttcttttcgcttagtcttgctttggcctatgcaggctttttcgtcccatatgaattttagaattgtttttcctagttctgtgaagaatgatggtggtattttgatgggaattgcattgaatttgtagattacttttggcagtatggtcattttcacaatattgattctacccatccatgagcatgggatgtgttcccatttgtttgtgtcatctattctttcagcagtgttttgtagagatctttcacctccttggttagcctcagtccttttgcacatgcctgatatgccctacctgctctatctcctttcacttaaccgctaatagtccttaatgtgtctgtacatctcactctaggaatctatattaaaggcgcacaaagatatatcaggatgctcattgttttatttttgcattagggaaagtataggaatgaagtctatcagtgggttaaacaacttgtgtccatctatcctgtggttaccatgaagctggaaatcgatgacagatctgtacagaggaacatggaaagatctccaggccatgttgtactggggagtcctgggagcaaagagagacaggttcatacatggtagatgacctctcctatcatcctgagtaaagagtcttggggaagggcttaaggaagggataaaaagggagtttactatcaatgggccctgggtctttagagagccaaggtttccctaataacccctcactgggtgttcaagtcatagaaagcatgtatttttgtgtgctgttctttaatgaccaaaatttcacattgtatagtttcattgactaaattaaaaatcatctgtaatttttgcaaagggatactggactcaactgaagccagtatagctatgttcctgagtgtatttgattaggggtcagaaaacctgcactcaattcttaatttaccactgactaaatctctaacttggggctagtatttttacttatttgtgtgagctttactttcctcatccatgccttgagagaggtggacaaaatgatctctgtggtcttttaagatgctattggtctattactcttaaggcttgtgtaacgttaataagaataataattactaacatactgctagtgattaccatgtgatagacacttcttatatgtattaaccatttcaattatcatagcaacatatgaaataaatactattatctctattttacggaagaagaagctgaggcccagaaattaagtatgttgttcaaagtcacacagctagaaagttgtggagctattaacagaacctcaatccaggcagtctgactccagaatccatgattccagccagaatccatgattccagccattcggttatgttgcaagtaaaattgacctttttcttgccacctgattgaatgagtcatacaaaaaaagtgttaaggaaacaaatctgaagagctgatgtgaaaagtatagatgaatataagaaattatagatgactataagaaaattagagacctaatacaaaaaaccagcaaaattttacttaaatatttagcatttttataacatatcacctctatgtaccataatgtaactatatctacttacttcaaatgcaagaaaaaagatgtcacaactacctcattcttatgcattccttttttctctgaaaataacaccaaaagacacacatggcattgatgctttcaattttaatttcacagatgaaagaactcggtgtcatcttctacaactgcagctgcctggtcctagatttacaaaggatatttgctctatatagttcattaaaattcaaaagcagagtgcctcaaacctggtccaaaagactctatggagtctatgacaatgaaaagaaattgcaacttcagttgaatgaaaccaaatctcaagcatttgtatcggtgagttgttttccctttctcctccccttctccttcttcctccaaaggctctttattaagttggaatgtttaagtgtgatcttgtattgggcaaaaatgaattacagtggttctatcccatgacgtgaagagttaaaatgcgtccacccttacacgcaatcataccctcaaatataataaatcttgatcatcattccttgtgtcagataccttgagttatctgatttgattccctcaatcaccctgtaagctaggtatggggttgtgtccattttgcaaatgaaggtatcgaccttacctactagcaaaaagcccatccgatgggacatgctaagagcggagccagcacccagctcttctgacaccagagcctgttagcctgttttcaatgccctacattgatttttcagacttgtttttatcagaaccctttgatgagacaaatctgagggaatctcagtgtatagatcagacaaaagcagagctgctgtacctggttggggcaagcaggcaagaggcccacacaacaggacagtgctccttgcacagcttcgggcctctgactctgctaagaaccattagccacaccctccacccaccctcaccttcccagtccaccacccagctaggcacatgccacagctatccagagatgttactggaaaggggcaatgtaaatatctgggcctacagtcctagtcctcaaactgtagtacagtagatccttcaataacatcgttttgttcaatgcccattcattatcatgttgataagaaaaaaaacaattgattttcggctggggccactgtgtgtgtggagtttgcacgttctccacctgtctgtgttggcttttgccgggtactgctgtttcctcccacatctcagagctgtgcaagtggaatgaactggcagatctgtgtggtcccagtgtgagcgagtgtgaatgtgtgtgtgagtggtcccagtgtaagcgagtgtgaatgtgtgtgtgagtgtgctctgcgatgggatgtcctcctgtccacaggggtcccggctgcgaggggctctggccacctgtgaccctgaactggagtaagagggtaaataattattttacttgtttttattagtctttcttaaatgtatgtatagctcacatttgtttcaatgtttaatattcaaagtgttttggtctttagaagtttgatgctgtttttgggaccagaaataagccatagcaacttaactctcctttatatcaattagcctatggtaccattgttttcatcatacatcagtttgcttaaagtcatagtattcaagaacctgtcggcgtcattaagtgaggacttactgtacttaagaattggctacgaagtatgcttaaagtgcagatttatagtgtcccctgtccccacccaggatcttatccactggatctgagatgagatcttagaatttttatttgaagcaagcttctgaaattatcctgatgttcagatcaacttctctaagtaatgctcccaatttaatattgctatttcaaccttggttgatattggtgcttttatgccaacaacttttttgtcactaaacagcattttgttgaagataaagtgaattgtatcctttttgcctgttcaaaggaaaacaccagcagaaaatttagaagtgtaacaatagaaagaaaacacaaagttcaagttgtcttaaataacaaattcacataaatgtgaagagcagaaaatagactatgaaggatgttcatcagctggaggtaaaataacatttttgtatggaggaggtcaagaatggagtagcaagtagcatattatagggcattttacgaataaatataaatataaattatatagacattttcaattcatctcaagatgaccctataagaccaggaggccaaggagtattcctaatttgtggatgagcagcaatagaaaatttgccaaggaacctttaatccagagggccacagggtgacactacatgccaagcgtggatcgcttgatcagatccagtagaaaaacaaattggaaatagcaaaaaatagatgaattaatgaacaaattttgaataatcactggattttgaatttacagtttcaaccttggagataagtgaatatggttgttgcatacatttacatactaacccttaaacagggaaagagtcagttttttgttgattttaaagctaatgtatttcccagagagagtggtctcaggcctttagtaaaatctactacaattcgatacctttgttattttctagggcaaattcataagtggctttttcttaaagagttcaccacaaaaagagctgtgagacatttctttgggtagttttttaaactgtgtaataccttttcttttgtttaaattatactttaagttctaggatacatgtgcacaacgtgcaggtttgttacctatgtatacatgtgccatgttggtgtgctgcacccactaactcatatttacattaggtgtatctcctaatgctatccctcccccctccccccaccccatgacaggccctggtgtgtgatgttcccctccctgtgtccatgtgttctcattgttcagttcccacctatgagtaagaacatgcggtgtttggttttctgtccttgcgatagtttgctgagaatgatggtttccagcttcatccatgtccctacaaaggatgtgaactcatccttttttatggctgcatagtattccgtggtgtatatctgtcacattttcttaatccagtctatcattgatggacatttgggttggttccaagtctttgctattgtgaatagcgccgcaataaacatatgtgtgcatgtgtctttatagcagcatgatttataatcctttgggtatatacccagcaatgggacggctgggtcaaatgatatttctagtttactttctttttttatttacttattttaacttcctgttttattttctattttttaataatatcaagcctgcctttgaatttcaattcaacagatattgattgaacaccatttctggagaggtataaaatcctacaggtacaaaaacagtcagaaaaccctgcaactggaattgatatcattcagacagagttccttgaactcccttctattataacttttataactatttatttataatcatctttcccaccattttattagactctgaagatcacctactattaatatatcctcttcatcattggtattcccaatacttcacttagtgctagctaaaagcagcaatgaatgttggataggttttattagtagtaatattaatagaaagctccagaatgcatacagttttctcagtaatatatgccagacaaatgccaagatgaatttaattcaatatatttgttgtatcttaaaatagtatatttttataagctgattgtctcaagactaagttgaacacatacataaagagtatttgaagaccttaataaccattctcaaagttagattttagataattgataacttagcatagttagatataaattttaacttatgatacaaatatggattatttccagttttttcatggaacacaaataggcacttagatttaactgtgtgatttctagtaacttgggccagataattctcattttcttgcatttcccattgaaattggaggatgggaacaatagttggctgtttctgtcttgtaggtttctttttggagcctttaagcttaagcaattgctttccaagataaaagactagttcaaggtctgtttttattgatctagatgttagacagatttcatttcttgtttattgttcagttaagtcacctgtcagccatgtatatggagatgtatttagtgagtgagggctgacattaaatagaacttgatgctgctatggaaaaatactgcatcacattcctctttagaaccttctgcgtatattgtaaattagtttaacagccttacagagacgtaatttacacaccataaaatttacccttttaaagtatacaattcaggctgggcatggtggctcactcctgtaatccctgcactttgagaggccaaagctggctgatcacttgaggtcagcagctcaagaccaaccttgccaacatggtgaaaccccgtctgtactaaaaatacaaaaaataaaaataaaaaataaaaaataaagcatacaatttagtggggttgagtatagtcgcagttttgcaaccatttctacaatctaattttagaactttttttcaccacaaagaaaaaaccccatactgattagccgtcactattttcccttctctcagtccctggcaaccagcagtctactttttctttatgaatctgcctttttctggatattttatataaatggaatcatatactatgtagttttttgtgattgctgctttcacctaacataatgccttcaaggtttatccatattgtagcatggaccaatactgcctttattctttttatggttaaataattccattgtatggatattccacactttgtttacccgtctgtcaacagatgggcatttgtactactactatttcttggctattgtaaatagtgctgctataaatattcatgtacaggtttttatgtgaatagctgtttttaattcgagtttatacataggagtggatttactggataatgtggtaactctatgttggacattttgagaaactaccaaactgttttccaaattggcagcaccattttacaatcccaccagcaatatatgagagtttttatttctccacatcctcggcaacacttgttattttctgtcttattttagctctactagagggtataaaatgtaatcttatttttgttttgatttaaatcttctaacgtgcttatcggccatttgtatctcttctttaaagaagagacacaaaatatctatcaaatatgaaatcttttgcccatttaaattaagttatttaaaaaatttgtgttgtaagagttctttatacagtctgtatacaagtcccttaaacagaaatatgattttttatagagacaaggtcttactatgttattggggctggcctaaaattcctgggttcaggtgtctggtttaaatatatgattttccaatattttatttctttcattccatgggttgtcttttcatatttaattatatttgaacatatatattctacaaatagagtatatacttttttaaaaccatgaaactgttaatgaaataattaaaaacctgctaaggtctgtacaaggtgattatttaatgagtatgcaaaataaattacattcatatggtgcctactgatctaagagacaaacccagattaacctagaagtcaggtccctcaagagctcttgactggtaaaagattgccacagagctggaatattgaagaggatctgtattttccctcttcttctactttactatggaacaaagaagtacacagcacaaggctcggaaaattaattcagaagtgatgagagggaaacttagccctctctttaattaaacagttggaactagttaacttcctctgccagctcattcttttgtgttattgtttattcatttctattctgggcagacattttacagccactagtctatccaggcactatttttaaaggtagaagactctagaacacatagcaaagtaccactcagcccccaggtgcaaggggactgatacaaataattatgcatttccttcataaacacatggagctggagcacctgccattgtgtcaggcagtgggaacacaggaagcaataaggcaggtcagtgcttataaacatctgttgacacaggtttggaaatacccagattgaagcaacagactccaacagacaaacctccaacatttatgcatttatgaagcactttcacattcgttccataagtatgtattgagcatataatatgtgcatggcacaagatgccagagatacacaaccaggcagctcacaagcaagtggctaaacacatagacagatgaatgcaatgccatgtaacatgcgctagaatgaagttccacaaagaagggatcttgtcttggtcactgatgtatgtccccttcctagaccagagcctaggaatatttgctgattgaatgaaagcacgcacagaagaggggcatggaacccagccagcaaacaggccattcatttatttgagcttcaaggcaaaccagtatgaaaggtgtgttattttcattaaccccattaggaaacagaggctcaaaaagtgtaagggacacaccaagatgccccaggttctaagtgctggagtctggcctgtatcaccaaagcccatgctctttcctctaaattatggccacagtgtctatacttgtaagataacagcaaatgtaaagagaccacagataactctgcctacatttgttcctccccaaaaccaaaatctggttttggaaaaagcagtgaaattcagggagttcctaactgaaacaaatgtgagcatttggacacatttcagagtcaggcttctgagaacccatctggagcaaagatcttcagcttctccacattaaccaaagaacctttaaagcagagccaacatgctaagggaattaaataatttgaatatttttaatggcataggaaaatgagtaacatacaatccctaaaatccactgaactgtacacttaaaaatggttatgatggtaaaaaaagaaaaaagcaaaagaaataaatagtatgggagtacagggttgggaaaagcaacctttgattggagatttaaaaacaacttcattgccaggcgtggtagctcatacctgtaatcccagcactttgggaggccgaggcaggtggatcatgaggtcaggtgttcaagaccagcctggccaagatggtgaaaccccgtctctactaaaatacaaaaattagccaggtgtagtggcgggcacctataatcccagctactcaggaggctgaggcaggagaatcacttgaatctgggaggtggaggttgcagtgagctgagattgcaccactgcagtccagcctgggcaacagagcaagactccatctaaaaaaaaaaaaaattcatggaggagatcacatttgagctggaattcagagaacagaattagtaggactttgatagacaaaaataaagacacatgagccagagaagccggcatgagcagagatgcccagagtcagacatgatgagggcacagccgtggactggtaattacttgcatttggggtcacagacaggatgggagttggcaaatgaaggaggcagagacacaggaccatggatacacccctcccaattagttcaagctggattctgagaaaccaggagtcagttcatcctgggagtgatgtatatttgtttttaaacatctcagagataaggcaatgagttagaaagatgttagaacatccctgaaagcagcactagtgcccaagtgagggaaacttactgagtgatcaagagtaagaggagggacagacccaggaaaccctgcagaggcacacgctttctatcttggtgacagatggagtatctgtatatctgtgtgctgatgacagaggagtgtaggactacctttaaaaaacagacttgaagttcatcctcattccaaaagaaaaaaataaatgatcaaaaactcatcctgtaaagaaaatatggtacatatgcaccatggaatactatgcaaccataaacgagaataaaatcatgtcttttgcagcaatgtgggtgcagctaggggccattattctaaggaaatcactgcaggaacagaaaaccaaataccatgttctcacttataagtgggaggtaaacattggttactcatggacatagagatggcaacactaaacactgaggaccactagcgcatgtggggaaggaaggggacatgggtggataaactattgagtactattctcactacctgggtgacgggatcagttgtgcctcaaacctcagcatcacataatatatatccatgtaacaaacctgcacctgtaccccctgagtctaaaataaaagttgaaattcttttttaaaaaaccgactcatcttgctcatgatcacctgccaagaggactttctgtgtgaggaaacctggaaggtgtgtgatcctcagcatgctccttccttatccctatgcccctatgccccttctaaggtgggcgtccagtccaacagctccatctcacaaacctctaagctggggtggggactcctactgtgcagtgtagggagttgttccagacataattggtgaggaggaactctgaccgcccaatactaccattcattccaggcagttccaaaaatctgtttattcagccttttggtcctaaacatcctggcattatttatgtcccattataatgccctggcattatttatgtgatacttgtcacagcgtatcgcttgtcaaagtaaaacagcaactgtgggaaacactattttcagtcctgtccagtggaaaaataatgagaaaaccaaacacatctttccctttctacagcaactccatctacaaacaccatatttttataagatgaaaaccacctcaagcaacaggagaaaaatgcctcaagcagaatttgcctctttttttcattttgcttaaatctttcagaacatccttcttctctggctctcctgctgaatttcggcatcttaatagctccctcagatattccttcactgttatcgatgaccttttctcaacaatcaacacttctcctaactcaatgaaagattttggagaaaagaaaaaaactccaagatttttttttttttagattttgagtttgaaacatttttatgcccacatcatcacatttcagatgaaatgaaaatgctggagtaaatggcttgctatgtgcagtgtgtgtgcgtgtgtagtaacacctgagaaaattattagctatgtatgacagaattgtgtaaggttggaggtggagtgctcctccgaaaagaagtgtgtacactgaaagcaagaattctctcctaagtaaaaagtaaaacagaagatactagaggctggggaaagagggggtggggaaagatttgttagtggatataaaaataacagcaagataggaagaataagttccattgttctatagcagtggtcctcaacctttttggcaccatggactggtttcatggaagacagtttttccatgggccagggtcagcagggatgctttcaggatgattgaagggcatcacatttattgtgcactttcttttttcttttttttcttttttcttttcagacagcatcttgctctgtcacccaggctggagtgcagtgatgcaatctcggctcactgcaacctctgcctcccgggttcaagcgattctcctgcctcagcctcccgagtagctgggattacaggtgcacaccaccacgcctggctaattttttgtatttttagtagagacggggtttcaccatgttggccaggctgatcttgaactcctgacctcaggtgatccggccacctcagcctcccaaagcgctgggattacaggcttgggctaccatccgtggctgtcactttatttctattattattacattgtaatatataatgaaataactatacaactcactgtattgttgaattagtgacagccctgagcttctttttgtgcaactagatggtctcatctggggctgatgggagacagtgacagatcatcaggcattacaatctcataaggcgatcacacaacctagatcccttacatgcgcagttcacagtagggctcacgcccctatgagaatctaatgcccccactcgtctgacaggaggcggagctcaggcggtgacgcgagcaagggggagcggctgtaaatacagatgaagctttgcttgcctgtcattcacctgctctgcagcccagtactggtccctggcctggggaatagggacccttgttctataggaccgtagttaactatgactatacttaacaataatatattagatagtttcaaatagttagaaggaagatattgaatgtttccaatacaaagaaatgataaagtttgagatgatagatatgctaattaccataatctcatcactatacattatatgaatcacatcactatgtgccccataaatatatacaattatgtatcaattaaattttttaatacataaaaattgaaaatcaaaatgtgtcagataataaaagaattctttccaaaacagacttgagacccatcctaccacactttgatctttattcaactttgataagattgaaaatatctttgtctaatttgatgaagcagaaattaggtttgcaaaaatatagttacaagccaaggtccgtggaaacaaaggaaataaataaatccccagctgccaaaaattagtacgctaaaagtttggcttttgtgtcttcacagaattctccaaaactcttttgccctaaaaacagaagttttgacatagatgccatctacagtgtgatagatgatgccaagcagtatgtgtacatcgctgtcatggactacctgcctatctccagcacaagcaccaaaaggtcagtgaatgcccagcctctggttagaacccagtccctaagaccaggcactaaactgggcaccacaggagaagccagcctggaaatggagatgccatcaggttgccttaggaagagcacaccattcattgctgtttaacatgcattggcaatttactcattacggagcttttcccaaagtgggtccattttgaaggctcatggtctcaccctacagaagtacctcagtagtttacattatggaaatgagagtaactttcaaaagaaaattaggttgctctcaacttgaaaattatttgaaaggataaaagataaaatattatatgaaaaaaattatcatttgaaaattattaacaagtatatacctgaaaagggcatattgaaacagagtagtcttgccagactttccttaaaggaagcattgttgttttatattcacagcagtcttcatttaatgccaaattctcataatatcttctcagtgtaaaggagaaagaggccatgtgcggtggctcacgcctgtaatcccagcactttgggaggccgaggcgggcggatcacgaggtcaggagatcgagaccatcctggctaacatggtgaaaccccgtctccactaaaaatacaaaaacaaaattagccaggtgtggtggcgggtgcctgtagtcccagctactcgggaggctgaggcgggagaatggcatcaacctgggaggcggagtttgcagtgagccaagatcacgccactgcactccagcctgggcgacagagcaagaatccatctcaaaaaaaaaaaaaaaaaaaaaaagagagagagagaaagaaacttcaaatatctatgttctcagtcaatccatccctctctgtgaaaagagaacagtttaaaaatgcagtgcttttcaataattcatcattgcttaagcatgcaaacacggaataaattcagggatggaatttatgacaaactctttgggaaatcattgcatgcataaatgcgtggccatgcttaggtattcccacttttgctttcgtgctgggaatgcagaggtgcttgaataattagtttgatccaggaaatgttttcaaagtgcatattttggggagtgcaaccccaggcctttttaatttggaatattacagtttcaaaataagcatttactgaggctaaatgattaagtgtgccctttattgcttgaataattcttacatcaccaaccctacataatgcatagtaggtagcttctttacgcaaataaccataggattacaaaaagagtccttcccccagaaaatgatcatttcttataacagctagtagaaaagcacttttagctgcaagattcatattattgaaatacttttattttaaaatattgtgcatctttacaaaaattagctgggtgtggtggcgcacgcctgtaatcccagctactcaggtggctgaggcaggagaatcgcctgagcccaggaggtagaggttgcagtgagccaagatcacaccactgtactccagcctgggcaacagagtgagactccatctatatatatatatacacatatacatacatacacacacacacacacacacacacacacacacacacacacagtgcatcctttggacattcatggatttttttcaccgcacacttccacaccttttctatccctcctttttatttttcctccctttgttgttcacttggttttagatttggttttagattttacctctactttgggaacgtttcaaaacgtaataggggttttgcctgattttcctgttattgagaaggagagtaaggtcaagttcagggagttatatgttaggatggcataatgatttctcaggattgacaaaacctttgttccatgaagttctatgaacaaaattgagattcttcctggtcaagaggtaaataattagcacggaggatctaaaatattttagaaatctaaaatctagagaaaacaaaatgaatgttaaagaatcagagactcacttgaaattttgcattttggttataatctaccatttcagctattaaatgaaacttcttttattgtatttttaaaattttaaacctgtaaatgcttttaactttctaaattgaaaggtcatcaaagagacataagtagtcgtccaagcatcaagattataattaaattcttctcaatcagataaattaattacttgtataaattcagactggttactcatctttatctagtcccagaaaagcttttcaggagtgaattcaactttaataaataggtaaatactatcaaatttcagtatgttaatggaattaatctttcagacttaacttttagtctatacattgccaaacatccagatgaaagagaaaaaaaatcatacactcccaaatcagaaatgattaacagcgtgtaaaaaaaaacagacactattatttagcaatagtgttagaaataacttctagttttcaaggtagtaggaagggaatggaacaatgatctgtgactaaataaatcctacaggaaaaattcagaagccggccaggcacggtggctcacgtctgtaatcccagcactttgggaggccgaggtgggccgatcacctgaggtcaggagttcaacaccagcctggccaacatggtgaaaacccatctctactaaaagtacaaaaattagctgggcatggtggcagacacctataatcccagctactcgggaggctgagacaggagaatcgcttgaacctcgacagccaaggttgcagtgagccaagatcacgccattgcacgccagcctgggcaacaagagtgaaactccgtttaaaaaaaaaaaaaaaaattcagaagccctatttcacttcttcctgatttagcaatcaagctctctttcttaagcaagtcaattatttaggtctcagtttggggttgttcattatttatttcttcagtcacataaaatatatctttcacaaggaaattagtaaatgtgtaaaggaataataaaaatgtagcctgattagcctttgaagtgttaatgctttttatttatgtattcattcaaccattggtgtgtgtgtgtgtgtgtgtgagacagagttttgctcttgtcgcccaggctgagtgccatggcaagatctcggctcactgcaacctctgcctcccaggttcaggtcattctcctgcctcagcctcctgagtatctgggcctgcaggcacatgccaccacacagagctaatttttgtatttttagtagagatggggtttcaccatgttggccaggctggtctcgaactcctgaccttaggtgatccacccacctcagcctcccaaagtactaggattacaggtatgagccaccgcgcctggcttcagtcaacaaatatttattgagcactgtgtaccagtgattaaagcatgaacagcatatgatctcaacctccatctaacaggacaggaaggagactattagaacacagaggtgtgaatggtacaatgaatgcacctgaggctgaggcaggagaatcacttgaatgtacctgaggtacatttaatgagaattaatgtcatttaattcttatgttaaaacaaaaagctttcctgtcttaaggaccaagccttaaatcactcttcctccccttggccctgacatttgtagaccttttgttcactcatcaaactcttgccctaattctgggccagttcagtattggaactaatgatacactatttgaaactgtagcctgccagtgtcatgatcattgcacctctaaaggtctctaatggcctttatgataatataataatataataataataatatataatatagtaatataatatctatattatatataataatataataatataatgtgattctcctgcctcagcctcaggtacattcattgtaccactcacacctctgtgttctaatagtctccttcctgtcttgttagatggaggttgagatggtatgctgttcatgctttaatcatgatgaatatcacctttagaggtgcaatgatcaccgttcctgcctcagcctcctgagtgcagaatattacagacactaggtgaaagagccccgcggcacagcttcagggttagaagaagcccattggaggagatgctcactgacttataattcaaaatattcagtttccccacaaaaatttcttgaaaaaaaataatgaggaatttgtcagaaaagggtgaaaaattttcccagtggaagggacagcatgagccaagtttcacatgtagagaaaaagagctcaaggtaaggtggtgagagatctaactggagagggggcaagggccaggaaccagagatcctgaccactgggggagtcttgtgactttgtggagcttccactttatggatttttgtggggggtggcatttttttgttttgttttgagatggagtcttgctctgtcacccaggctggagtgcagtggcacaatcttggctcactgcaacctccacctcctgggttcaagtgattctcctgcctcagcctcccgagtagctgggattacaggtgcatgccaccatgtccagctaatttttgtatttttattagagacggggtttcaccatgttggccaggctggtctcaaactcccgacctcaagtgatccaccgccttggccttccaaagtgctggaatgacaggtgtgagccaccgtgccggccccactgttttaattcaagaagtagcatcaccaggtctgctttagatggatcactgcggtggtcatcgatgaagtacatgactggaggcagagaaaccaattttgagcacaaggctgagatgatctttcctgtagtcctcagcttcatgggtataaaaccagacaaagaaaactgtagcgtggatccaggatctagatttttgccaagagcaagaggaaggtacagaggcaagtatctttcaagtgatcagaactgagatgaggctgggcaggcaagggagacaggaggagctgatggaccgggcagattgaaggcatcatgaatctgcagcctgcatgtgatgaaaaagcaattaagagagtggggaataaggacaggaggcctttagaggtgcaatgatcatgacactggcaggctacagtttcaaataatgtatcattagttcaaatactgaattggcccagaattagggcaagagtttgatgagtaaacaaaaggtctacaaatgtcagggccgaggggagggagagtgatttaaggcttggtccttaagacaggaaagctttttgttttaacataagaattaaatgacagtgctggaagtgacagtgtgtgttgggggccggcagaggcagagtgggagtctgccccacatcataagccaagtggccaggtcatggtagaaaatgcacgcagaaatccaggagaagctgtggcctcagggaagaaatcaggatcaagttaaggcaaaggcttaaggattcagagaaaaggccaagcctgttggggaaactttgcctgttggaagattccaaagaccctgcagaaaacgtggaaggcaggggagacatgggaggcttggtaaggagacaccacggtaagacagtcgggaaaaggaagtgtggggaagctcagatgaccagagcgtaagttcatttcggggacaatcaccaaagagaggttttagtggcatttggggactgagggggtgctcagggttcctaactggaattcgattggataatcagttcttagtggactgaggcccaggtagcgtcagagatgtagtaagggtggcctgtggaggcagtcagcctgtcctcaccccagcccacacagcccaaggacctggtggtaggaaacctccttttaggcaggggcaggtcccagcaaatcatcatttcttggtgcctaagctaagatgcttgtatgtttttcagcctctccgatgaggttgcttatatatattacaggataaagtaatgatctgagtaatatcaatgttctatgctgtctagtaaatttcttttcccaaactaacttagtttattttttctatttggatatgatttctgcaggacttactggccagacttggatgcaaaaataagagaagcattagttttacgaagcgttagagttcgactccttttaagcttctggaaggaaactgatccccttacgtttaactttatttcatctcttaaagcgatttgcactgaaatagccaactgcagtttgaaagttgtaagtattacgttgactgtgttattaaataaaaagtgaatgccctctgcatgtgtgtgaaagctgcaagcatacgcctatgtgtaaagttccagtaagaaccaggacggcaatcttcaaaaagcacgttaagtaattttttcaaaacaatcacatacgaaaaaaagagtagagctcatgtttcctgatgcctcctccgtccagccctcttctcactttctgttgcatcctttccattttcttttttcttttttttcttgagatagggttttgctctgtcacccaggctggagtgcagtagcacaatcccggctcactgcagccttgactcccaggctcagctaattttgcattttttgtagagatggggcttcaccatgttgcccaggctggtcctgagctcctgggctcaagcaatctgcccaccttggccttccaaagtgctgggactaccaacatgagccaccgcacccggccctctccatcttccttgaacgaccccattcacctactgctcctatttctaagactgtgaccaacagagcactggagcatgcagcagcacacagaccccccgcccagatgcctcgtcgtctgggtccccatgcttgccccaggtcccttgggccacgtactaatccccctctggagaccttgagggaggtaagattgggaattagcaatacctgaaatgtgttaattctctaggtcatgtttgactctactccagtcctcgtcgccctcttcctccaccccagacttggtgcaagctattccctctgcctacaacactcttcttctccatgtttacccacctcataaccactgatcctttaggcctcagcttttctcaacccccatgcagccattcaacagaatctggcctgtggcaggctctcttctaggtaacgaagctgcattccttgcagcatttagggacccagggtatcaagggctccgcaattaactttgacacatggcttccaagatcgccctgaccctgaatatcccaaggccagacaggagaagagcgaaattggagggctgtgtgagaggcattttggattgggactggaggtagggaacatccctttagccttcattccactgcctggatagctttcacatggccatgcctaatggccagggaggcttatgaccatggtcagaaagtcagctgtgtttccagggtgacaaaggaacaggtttgtgaatcatcatggtctgaagttcctggtacacgggatccatttcactcatcttgcctcatagagaaccctcattctcacctcccacaagggagaaaatgcaaagtttcatgcagtcactgcacagagtcttccagtgatgtgcatttctggacatcaagcctgaaagcggtacatcatagtttgtcaatgtaaaaactaaaataaaaccgtaacaattccccaccacacaccaaaaaatacctaacatcaggttaatgttacctccctccctgagtacagaaacaggatacgcacaaggaaaactgccattagaaagggaaggtttggaggcccatggcagttcctggtccacagcaattataaaactcttctgggcaggtactgtgaagtcctcatactcctgctggttcaaaccaaggacccaaggttgttttaaggcatgaacagttaaaggagtttggggtcctagcatgagctggttggtttcttgggcaatgcaagtttctcagaaatgtaataggttctgatgtacttgtttctagttatttccatgtatccatagccatgtccagagtttcttgttgtacataattccctaacttgatgaattatgctttctagttcatagacttctctctctctaatgatagagtttatgcaaaaccatcagacacaggtgggaagattacacctattattattacaccaattatttcatcttttctacagggctcagtcttaactggccacttaaaggatttttcatacttattttctattattgagctttaggtacaatcagctttttcaaccctgtgaaataccaaatttctgggtgatctgttctctatatcatttatatcatttataaactagcccttccttccctgagcctatttatctcctctaataagctttttaaaagcacaactaacaggccaggcacagtggctcacgcctataatcccagcactttgggaggccaaggcaggtgaatcacttgaggccaggagttcaagaccagtctggacaacatggtgaaaccccatctctagtaaaaatacaaaaattagctgggcgtggtggtgcacacctgtaatcctagctacttgggaggctgaggcacaagcattacctgaacctgggaggcagaggttgcagtgagccgagattgcaccactgcattccagcccgggagacagagcaagaccctgtctctgaaggaaaaaaaaaaaaaccaacacacagtacaaacaattcatttccccagtccctatagccgaagccctataagccaaaggttcagtggtacttggtattccttccaaataaatgctggctatgtttttaccaaatagtttgtcactgtataacatgagttttcatctctccaccctacaataccaatttacttgctgcctgctgtccattgagtaaaccaatgctacatcgtttattaagtttttgttgtgttgctgttatgacagaaccacttcacattgcctgaacttagtaagtacttaatactttttaaataagtgaaggaatgtgttagattcatgaatattcatgagtatatacagttatccaggcactgaattaaatgccttctatagattatataatattcataaccacacagccagacatgtggcttatgcctgtagtcccagtgttttgggagtccaaggcaggaagttcatctgaggccacaagttcaagacctgcctgggcaaagtagggagacccccatctctacaaaaaaacttaagagataataatatttacaattacccagtgaaacaggtactttccctattttatagacatgggaactgaagcatacattaaataacctctctcaaggacactagtgagtaatggggcaagactcaaacccaagtcttttgaactccagaacctgagctcttaaacatgtctccatggcgtctgcatgtagaagagatccttgcagttacaaagtcctttttaatctttcttatctatattaagaaacatcacatacaccaaggtgcagtggctcacacttgtaatcccaacactttgggaggccaagacaagtggatcacttgaggccaagagttcaagaccagcctggacaacatggcaagaccctatttctacaaaaaaaaaaaaaaaaagcaaaaactagccaggtgtggtggtgcatatctgtagtcctagggactcaggactcaggaggtagaggcaagaggatcactttagcctaggagttcaaggctgcagtgacctatgattgccactgcactccagcctggggacagaacaagactgtctcgaagcaaaaacaaaaacatcatatactgcatctgctcaaagatatgagaagctacacatccgaattatatccctgaggatcaaaaaaagaatcagataaaatgtttgtaactcattcatgccattaagatattttaaattttatttttcatgaaattattaacaatttaaatacataaaaatttagaatttactgtaaatttccaaaaacaatgcttctcacctgtgttttcatcttaatctcccgaatagtctggtaacattgatggataatagaaattctgatctctacttaactggtttttgtaaactgaggaaatcatgcacatatctgtgtagtcacaaatcagtgtaagtattggaaataaaaacatgactgtgattactaccacagatctgttttccaggccagattttcaaataaatgaaacaaccaggagttggatcagggcaccaacctgggtttggagtcaggtgcccagtatcagaggagaagcaggtgcagtcctaggaagtcagagacacaggagaatggagtctaattgtgttcaataccttttcacagacaagagaactcttgggattgattcagctccgaaacagcattttccagataattacagtggcatacggagctccagcaaaaaggaagtgagaaaaagaacaggtgtctagttcaccaatggctcacatgacgcttggtggagttttcaaaacatacatgttgaatgagtgcatgcatgaacaaatgaagtcaaagaagggagctaataaaggcagagtaataagaaagattctgcaagccagtgaggggacagggcagaacccaggacagtgcctgagtccaaggtgtggttagccattttctgcaggtgtgcgctggggaagggtgaccatgggtgaagaggctgcccagtgaagtcatgcactctggaggtcagtacactcgcactcagaggagcccctgttattcgtgaggtctagcaggaacagagaggacagtctgggacttttggtataccatatggtacatttgctccaatctccttttccaaattctcctctggccaagtcacgggtccatgtccacccactgtttcttgacccccacagcacacctgccactagggcacctgcagtcaaaacttctagggcgtgaaatgtcaactgctctcatttaagaattacaaaaaattacaaggaaagtagcatccatcattgcaacctttacagtacttaatcagcttcatctttttgatgtttttgatcatagatggtcactttttttttaataaactaaacattagtagttcacatatagccattttataaaacagaggccatacacttctaagcatcaatacaagcctagatgggcaagaagcttatggccctaatgtctagaacacagatgggtgataaactcttacaagaaaagtgaggattggaatcttgcatagagcatgtctccaggagcctgggagcactgacaaagcacatggcctgggaactaggtagggaatctctgtccttaaaggagtgggcacccccacctccaaccacctccagccctgatgtgggcttatctccatgagggactcatgaaaagagaaaagactgtgaagcacagaattctcccagtcagctgattttttagttttttttaacaaattaataaaccccttttgaaatgtctttgctgtcacccacagtgtattaggtgtcgaataataccagtgaataaaacctcatttctgctgtcattttagtcttccagagaaagctgtttcccctcttaagggccgtctttgactttctagagcaaatgggtttttactaaagcctcaagctgtgactctatccttgacttaactcaagatgtatattttattctttttgaaatccatcttgattctacaataatatctttcccaaaaggaaacagtcacacgtgtggccacgtgttgtgatattatgtccaagcgaggtgacttctggctgttattgatggtgatgccctcaacattcatgtgacctcatgaacataaaactgtgacttaagaacattcacaggttattaagtcagtctgaagagtccagaaaccaatgcagattttacagaagacaggaactgaggacactgggtgaaccaggtatcattgtctataaccgtggtgatagggccctgagagccacacagataatgtgtttacctgtgttgtggaatagacagtttttaagtagtagattttgatctctgctctgtggacctcaagggttttacaaaaaatcaaaatagaacttttgtggctagaagggatcttactgatcatctagtttatcaccgttctaccacgctaggggagggggaagtccaactctcattatttcctcaaaccaaatgtgaacacttacagttttaaaactgtaaatgacatctccttttctaggtatcatgccattttcctccctgcctcttctttcctttaaatacacgattctatagctgtaagacattccacaaggttccacgcagttctgaaaatactcaacattttcccatataggggatacctgatattttcacctttgactagtgtcttccagtgagctgagtcatggagttccatgagcttagccacagtttaagcctcatctgaaaatttagccaattccacagacccctaaggcatggcctggccattcctgcagtcatcccccttctttcagctgccccattcctggccttgggtgaactggaatgtcaccttttgagtcaataaaagttgaaattcagaattcacggtttgaagttgtgattttttttttttgagttgtctatcaaaagagctcctagacttaggtgttcagacagaaaagtatttgttcctatgttcctatggcaaagtctcttttgaccttggcaaatccccagtttaatcagctagtcattgacataatgtatgcaacatgtaagaatactcattcggttcattgccatgcttggcagaaagcaccctgaggcatgcttcaaagctggcaccccgatgaataagacaatgagaattaaacaaccttctggcccttatcctgctgaaaaaagaaaacgaattttgtgttcattttgtagcttaaaagtgttaattatatacctagttgagcacgctaattttctcttgttgcctatttagatttgagaacaaaaatagcttcatctatatgaggtaataagattatggctttcataacccaacttgaggtctattgttgacatttggataatgcattcttttgtgctcttggacaagaccagaaacgttcctcttatttacctgccccctttttttttttcttacagaaattttttgatctggaaagagagaatgcttgtgctacaaaagaacaaaagaatcacacctttcctaggttaaatcgcaacaagtacatggtgacagatggagcagcttatattggtaggtgtcagggctgtgaagctccttgggtgggggtcacccagggagtggtagtccagctgtgctccacggtatcccctggtgaggaagcaaggccttgggaaccactgctggtgaatgaggggaaatggagatgaggaaacaggacggtaaggacagggagctcatcattcaaatatctcttccatggcctgatttatgtactagaagacatagaagatgcctttccataaatgttttccagaaattttctggtccatttgcctcattgtacaggcaaggatgagaatggctcatcaaaggtgagtcctggcacaggaaagagcagtgtcatccccctgcccacagcaccacaagccagcctgacatgagtgatgggaaggcaggcagtggagtggttcagtgccgaaactcccaattcccagccaattatcccatccctgctatcttccaaatgtcccactctgtacaatttaacttgagctcttcaaacctcagttttctcatctgtaagatggggttaataatagtaactacttcattgggtgaagtgtagaagagacaaaatgtgcaaagtacctagcacatagataatacccaattaatgctagctatttttattattaaggttaaacagagacccaagggctggaatcattctacactggtgtaattattaatacatcaaacctattctagttttccatgatatatatgagtccatgataaccttttaactagtaccatcacaggcagttaaaacgatctatcagaaggtacataaatccaaaaacagcagtgtagtgattacattgtacagatgaagcagcagtcttaaggcagaaagaaacatgttcatggaatatagaaatagaaaatctgtatcaatttctttttttcaaattcagtgagtaaaaaatgtacccttttaactttgtaaagcacttgattcatttctcttcgcaacatcaccaatagggagggcagcttttatcatctgcagtttagaaatgaggaaacttggaccctaagacttggagaaatacagatgttagggggaaggagccgggtctggcatccagggcccccagtcatctcacccactgcctcccgcccctgcagacactgccactggccgtgtgggtagtcactaactcccagactcagtgtaaacgtattctttttccattttcaatatcacattagaagagagtattggaatattttaaagatatatatctggctgggtgcagtggttcacacggtaatcccagccactttgggaggctgaggcaggtggatcacctgaggtcaggagttcaagaccagcttggccaacatggtgaaaacctgtcgttactaaaaaataccaaaaaaatttgctggacatggtggtgggtgtctgtaatcccagctacatgggaggccaaggcagggagaattgcttgaatctggaatgcagaggttgcagtgagccgagatcatgccactgcactccagccagggtgacaaggtgggactcctcctcaaaaaaaataaaaataaaaaactaaataggccaaaaaaatgtccctgtctgacagctttgaagagagtggtggttctcccagcacacagactgagatctgagaatggacagactgcctcctcaagtgggtccctgacccccaagtagcctaactgggaggcaccccccagtaggggcagactgacacctcacacggtggggtactcctctgagacaaaacttccagaggaacgatcaggcagcaacctttgctgttcaccaatatctgctgttctgcagcctccactgctgatacccaggcaaacagggtctggagtggacctccagcaaactccaacagacttgcagctcagggtcctgactggcagaaggaaaactaacaaacagaaaggacatccacaccaaaaccccatctgtacgtcaccatcatcaaagaccaaacgtagataaaaccatgaagatggggaaaaaacagagcagaaaaactgaaaattctaaaaatcagagcacctctcctcctccaaaggaacgcagctcctcaccagcaatggaacaaagctggatggagaatgactttgacgagttgagagaagaaggcttcagacgatcaaactactccaagctaaagtaggaagttcgaacccatggcaaaggagttaaaaaccttgaaaaaagattagatgaatggctaactacaataaccgatgcagagaagtccttaaaggatctgatggagctgaaaaccacggcatgagaactacgtgacgaatgcacaagcctcagtagccgattcgatcaactggaagaagggtatcagtgatggaagatcagatgaatgaaatgaagcgagaagagaagtttagagaaaaaagaataaaaagaaacgaacaaagcctccaagaaatacaggactatgtgaaaagaccaaatctacgtctgattggtgtacctgaaagtgacggggagaatggaaccaagttggaaaacactctgcaggatattatccaggagaacttccccaatctagcaaggcaggccaacattcaaattcaggaaatacagagaatgccacaaagatactccttgagaagaggatctttgacaaacctgacaaaaacaagaaatggggaaaggattccctatttaataaatggtgctgggaaaactggctagccatatgtagaaagctgaaactggatcccttccttacaccttatacaaaaatcaattcaagatggattaaagatttaaatgttagacctaaaaccacaaaaaccctagaagaaaacctaggcaataccattcaggacataggcatgggcaaggacttcatgtctaaaacaccaaaagcaatggcaacaaatgccaaaattgacaaatgggatctaatttaactaaagagcttctgcacagcaaaagaaactaccatcagagtgaataggcaacctacagaatgggagaaaatttttgcaatctactcatctgacaaagggctaatatccagaatctacaaagaactcaaacaaatttacgagaaaaaaacaaccccatcaacaagtgggcaaaggatatgaacagacacttctcaaaagaagacgtttatgcagccaaaagacacatgaaaaaatgctcatcctcactggccatcagagaaatgcaaatcaaaaccacaatgagataccatctcaccccagttagaatggcaatcattaaaaagtcaggaaacaacaggtgctggagaggatgtggagaaataggaacacttttacactgttggtgggactgtaaactagttcaaccattgtggaactcagtgtggcgattcctcaaggatctagaactagaaataccatttgacccagccatcctattactgggtatatacccaaaggattataaatcatgcttctataaagacacatgcacacgtatgtttattgtggcactattcacaatagcaaagacttggaaccaacccaaatgtccaacaatgatagactggattaagaaaatgtggcacatatacaccgtggaatgctatgcagccataaaaaatgatgagttcatgtcctttgtagggacatggatgaagctggaaaccatcattctcagcaaactatcacaaggacaaaaaaccaaacaccgcatgttctcactcataggtgggaattgaaaaatgagaacacacagacacaggaaggggaacatcacacaccgggggctgttgtggggagggggagggggaaggaggagggatagcgttaggagatatacctaatgttaaatgatgagttaatgggtgcagcacaccaacatggcacatgtatacatatgtaacaaacctgcacgttgtgcacatgtaccctaaaacttaaaatataataaaaataaaaataaaaaataaaagtccagacagtaaaatattttcagtttagcagactaaaaaaaaaaaaaaacaaaaaagacttaaaacaaacaaacaaccaaaaaactaaataggctgggtatggtggctcacccttgtaatcccagcactttgggaggttgaggcaggtggatcacctgaggccaggagttcaagaccagcctgggcaacatggtgaaaccccgtctctactaaaaatacaaaaattagctgggtacggtggcatatgcctgtaatcccagctactagggaggctgaggcaggggaatcgcttgagtccaggaggcagaggttgcggtgaaccaagattgcgccattgcactccagcctgggtggcagagcaagactccatctcaagagggaaagaaaaagagaaagggaaagagagagagagagatcgatctttcgatcgatcgatacttctgaccttctggtggtgctccaatatgagaatattgactgggtgcagtggctcacgcctgtaatcccagcactttgggaggccaaggcaggcggatcacgaagtcaagagattgagaccatcctggctaacacggtgaaaccccatctctactaaaaatacaaagaattagctgggtgtggtggcgggcacctgtattcccagctacttgggaggctgaggcaggagaatggcatgaactcgggaggcggagcttgcagtgagccgagatggtgccactgcactccagcctgggtgacagagtgagagtcctctgtctcaaaaaaaagaaaaaaaaagagagaatattatttcattcctgttgtcactctcagtgacccaaaacgtgattattttgatttttctcatgtgcaccaacttatggagagtaatatgaaatcagctgcaagtgattaaaaacaaccccaaaatcatttaataaaaatgggaacttttggcttaatcatcagggaacccagggatggttcaggttttaggcacgacaggattgagggactcaaatctggatattttacatgtggagtttacttaaagtaagatgttgtgtgtcaattcagcagtgacttgtacctgtatctaaatgttcttttgtgggaatgttttttaaaaaggagatgagggcttaaaaattaaaattaaaaaaataaatacctgaaaccaggaatttttaaaaaatgtacttttgatgaattaaatgttttaggccgggcgtggtggctcacacctataatcccagcactttgggagtctgaggcaggtggatcacctgaggtcaggagttggagaccagcctggccaacatggtgaaaccttgtctgtactaaaaatacaaaattagctgggtatcgtggcacatgcctgtcctcccagctactcaggaggctgagacaggagaatcgcttgaacccgggagacagaggctgcagtaagccaagatcccatcagtgcactccagcctggggaagacagagtaagactccatctctaaataaataaatatgccggacgcgatggctcacgcctataattccagcgctttgggaagctgaggtgggtggatcacaaggtcaggagatagagaccatcctggtaacaatgtgaaaccccgtctctactaaaaatacaaaatattagccaggcgtggtggcgggcacctgtagtcccaggtacacaggaggctgaggcaggaggatcgcttgaacctgggaggtggaggttgcagtgagccgagattgccactgcactccagcctgggcaacagagcgagactctgttcttgataaaataaaatattaaaaaataataaatatatattttagagtgagacaaacctatatttgaattccagcactgacacttacaagctgaaaaatggtagaaagtcacataatctctgtaagcctctattttctaatctgtaaactggggataatagcacccacccttcagtggtgctatgaggcttaaacaagatagtgtatgaagagctcctaacactgtctccgatctatccatatctttaggcaatattgattcctggctctctcctttcttcttccctctataatacatttttaaatgagtgaattttacacataatattttagcaaaatgttaattccctagactgaagcacagttctagtataaaaatactcaaccctagaagaaaaaaaaatccatcaataatttaaataattatcagcatgttctgatctcctaagtcatcactgagatacttgctgagaacgcagagttgagaaaaatccacagtggaccttgcatggaatcactgctccactaagttttcacaagacttacagaagaatccccaaacagtgtcatctctctaattttgaaatctccagggtacatttgagtcaagctctgcaaacttgtctagaagatggtttgaaggattggaggactgacaagggggtagcgggtggatggaaggcactcaaaagtcccctgaaggcccatgcaccttcccagcgagctctcttgcaacctcatcatcatgtccctctgggtgacactacagttctcctggcaactggggcctcagcatgcatttttggaagctgcagtggtagtctcaaaaaaaaaaagctggatgaaattgcatcccaattaaaaaaacactgaagcatatatgtgattttgaagtcaagccagacggtcaggaagtgaaaggtagaagagcatgatcacaaaggtgcaggaattcctttatcggcctgtggaaagctttccagagccatgattcctgagatgagcctaattaaagcttttgagcatcagtaaagatgctggatcttggctcaatccattgaatttgaaggaaaaaaaaagctatatttcatagaataagtcttcaaaatcttgtcacctctctccatcattttccccccaccccaggctgcccccgaagcatatttccatgtatatttccttcagagagagtggtctgcacatgcacgtagcagaattctcaatgtggctatgatgctcctgacctcgggggtcgacattgtagtccagggtgaagcacacaattcttagcacaaaggatgcctttaggatcagaggcaacatggagtacaagtaaagggtggaccccggggtcagacctggctttgaacctcagctctgatatttttctattcccgctttggacaaattacttaacccttctgtgccttcatttcctcatcaatacgatggcgtttgtattaccacctcagaggacggcagtgaagattgaagaaataatgtaatgagatgatatattgactgcccttgttacagtgcctggcaacagctgtggggatgagagtttagtgtcatatccaaaagcccttaaaaggcatgcaagaccacaggagccttttgcttacggaatgaatagaagatactgcctggcaggggacacctgagcaacactcaacccacgggagctactaatcccgtttagagatccagtcctgtatttacctggcactgagcatttgcacagaactgcagcctctgcacatagtcacgtgtctaagagcacacgatcaggaacgccaccttggccacgggggtctctgggcagcgacaccaacacagtattatgtaccacttggaagacagttcactaatttatatcagaaataaattcgtccaaagctatgtctatcatgaagccactgatagtaccgttgtgctgtttattgagggggcagatgatgggttgggatgaggggagaaggataaagcaaaagggggcaggtccctctctctgctgatatttggtttagggacttggtgttcttaggctctgaggaataaactttaggagtaaaatgagagacaagaaaccaccttctgatgttctcaggggtgccaaatggaaaagggactcggtatgttcgagggctccagaatacagagcagagaccaaaatacaaaagctgcaaaggaacagaaactggctgtctcccagatgtgctttcttccagcagcttctcccacagatgactgcgggcccttgggccaggggtgcccagggagacagatgatctcagcgtcttagtgatttctgcagcgaaacctgagttgctgcagaggggacggaaggccaatatctccacctaaagcctgccagttccctttgtggaatcagctcttacccaaagaagataacaaaactgggagcttagatcagacctggcctagtggtaatttcgaagataattttgtccaccttgacatggctaaatattttttaatgagaataattcctggtttatcatacagtctggcagacctgggtgcaccagtgattaaccatgtgattaggcaaatttattcacccctttgagcctcccactcctcagctgtaaagtggaagtaagtcccaccaaccatataaataatgtatataaataccaagtagaagctggttccggtggttgcacctgtactcacagctacttaggaggctgaggtgggagaatcgcttgagctcaagagttcaaggctacaatgagctatggtcaggtccctgcactctagcctgggcaacagagagagatcctgcctctaaaaataaataaatcaggcccggcacagtggctcacgcttgtaatcccagcactttaggaggccgagatgggtggatcacttgaggtcaggagttcgagaccagcctggccaaaatggtgaaaccccgtctctactaaaaatacaaaaaattagtggggcattgtggtgggctcctgtaatcccagttactcaggaggctgaagcagagaattgcttgaacccaggaggcagaggttgcagtgagccaagattgtaccaccgcattccagcctgggcgacagagcaagactatctcaaaaaaaaaaaaaaagaaaaaaagaaaagaaaagaaaaagaagaataaagctactcagctacagagtagggcgtccacagaaagcaagtggagggatgtggtgtgtttttcttatataggagtcttatctatgtaaaagctaagctaagctgtgtctatgtgtgagtgagctgacagcatgacaaaatttattattctatcgatttaaagaaaacattcttggtgtaatgacattctagtgtgaaagtacatcgaagcataactatagctatcccgaaagcacatactgttatgggtattgggacatctggactttccactgctgtaggactgtatcctttggggtatctttaggctgttttctcaactgtaaacatctatgaccatggttgtgactggcaaggaacatgccttgttagtctcaagatggagctgaactgaaaatggcattactctagctctccaaggctgctgcttcccccacaccttgaagatggactacatgggagtggcatacacatgattagtctcttctagggcagatcccaggcttactcctttgcatgagctgaatcgtgtccctccaaaattcatatgttgaagtcctaacccccagtacctcagaatgtaactctattgagagacaggatctttagagaaatcgtcaagttaaaatgagatcattagtgtggcccctaatctaatatgaccggtgtccttgtaaaaggggggaaatttggacagagacatgcatagagggaagacaatatgaagagacagaaaatgtcatagagatgtcgggcacagtggctcgtgcctgtaatcctagcatattgggaggctgaggtggggggatcgcttgaacccaggagttcaagaccagcctgagcaacacagcaagaccccatctctatttaaaaattaaaaaaaggaaccaaaaagcataaataaaaagaaaatagaaaatgtccatctacaagccacggataaaggtctggaacagatccctccccacagttctcagaaggaatcaaccctcccaacacctggattttgtctccagaaccgtgagacaatacatttctgtagtttcagccacccaatttgtggaactttgctatggcagccctaaaaacacgaatacaccacataacacgggcagtcatacttgagaggctgttctcatagcacctgccccacttcctggggccaaggggccggatcctgggtctgggaaatgatttctagtccaatcgagtgtttgttaggaactgagtctcctctggcttcagcgttttctttgatgtgaaagcttcagggacttataattagaatccctcatttgttcacatggattagatgttgtctctttgagaaggtagtaattactcacaggatttttaaatgaatccctatatattttaaatgttgctgtatttagtgtggcttgtgaatgtcaataagaaataacatttacaagaaagaacagcagattccttgttttgagtttccaccggagcaaagctgaagaaaatgccaaaataatatgcaaatattaatatgccatatgtaaggcttcttggatttttttttcggagctgtcaacacaattcagcctctccgttgttattcctggatgttgatgatttttaatagaatccactctgaatttcattatattgggtatgttcccagtggactctaactcctcaacattatttctttgtttgtttgcaggaaattttgattgggtagggaatgatttcactcagaatgctggcacgggccttgttatcaaccaggcagatgtgaggaacaacagaagcatcattaagcaacttaaagatgtgtttgaaagggactggtattcaccgtatgccaaaaccttacagccaaccaaacagccgaactgctcaagcctgttcaaactcaaacccctctccaacaaaactgccacagacgacacaggcggaaaggatccccggaacgtataacatgatgaagaaactgacaggacagctctgtatttcatatttatacataaaggacttgaggagagaaaaaacactttaatatgtctctttttttagggaaaaagcacacttataaaaaatattctctgaacaacacataatacctatctaacaatatcttagcgtcgtgtacactaaaattaagacttttgtatttgttacctctgacagagaatgtcattctggcgtagaagttagtttttacgtttgcatacaaattttaagactttcattcctgctcctttctagttttagaactttttctgctgacctacccggtcagttgttaggaagcttagcatgaggtgggctctttaacaccattctgagaactgttgatttagagaggaaggtgaggattttgccttggagaagagactgataaaaccaagtgtttattcttgtaaatcgtctccaagacctacacagtcagctaagcatgaatagcttacatctcatgccagccttcaacacccttgaaaaatatccttttctgtcttgctcattttcttcttataccataagttttatttggtatcattttctcttctcacaaaatgttcctattatatagcattttctgtattcacctcaacattacttctaactatgataacatcttttgaaaacatacaaatttttcagaatggatactaagtggaaatagcagtctttcattttcacctttcaactgaatccttttttcccctaccgaattggtatttaaaaaaaatcacagtcagcaatatgtatcctttctctcaagctcagaaaaattatgtagccacctgctaatatccagcaagctatcaagtctgcattttgggaataaagtagtttttcacatttttgttcagtttatggtattataaaggaaaaaatctctatgcgtcagtggattttaatttctttagaatcattatgctgttaagagtatgccagcaaacgtttctagagctatttaatataccttctgctatttaatataccaaatgcttttcagagaaatgcaatttaaatactgtgcttaacatattttactaagaagcagaaatattgaattattgttctataacgtaattgtgtgttgttgttttatatctatacaatatatacccctgtattaatggagaccattgctacactagggagaggcatggcctcttcagagcccacagcaggtggccgggatgtccagttccaatgttgttcccgactctgtgactcaaagcggagcccctcactgcttggcctcgggcttctcttggtaatgtagacggtaataactcacctacctcgcaaggatgttgtcacggtaggaaatatttataacttgttttgaaatcaaaagaacctatataaatgctaagcattataatatataatctttttcttgaaataaactttgtcatatcttgatggaatcaacac

SEQ ID NO: 315 - DNA, 3299 bp, Homo Sapiens
gccggcgagcggagcgcccgctcgggaccgcagccgccgggcgacgtcgccgccgcaccgggcacttctgtctccccggagcagctcctccagctcagtctccagctccacctccggctcccgctgggcctcccgctcgccctccgcgcccggctccccgcgcgcccgtcccgagtccgctgctcgccggcggccgcccggtcatgtcaggatggagatccggcagcacgagtggctctcggcctccccccatgagggcttcgagcagatgaggctcaaaagccgccccaaggagccctccccaagcctgacccgagtgggcgcgaacttctacagcagcgtcaagcagcaggactacagcgccagcgtctggcttcggaggaaagacaagctggagcactcccagcagaagtgcatcgtgatctttgccctggtgtgctgctttgccattctggttgcactgatcttttcagccgtggacatcatgggagaggatgaggatggactctcagaaaaaaattgccaaaataaatgtcggtaagagaattgccctggtggaaaatattcctgaaggccttaactattcagaaaatgcaccatttcacttatcacttttccaaggctggatgaatttactcaacatggccaaaaagtctgttgacatagtgtcttcccattgggatctcaaccacactcatccatcagcatgtcagggtcaacgtctttttgaaaagttgctccagctgacttcgcaaaatattgaaatcaagctagtgagtgatgtaacagctgattcaaaggtattagaagccttgaaattaaagggagccgaggtgacgtacatgaacatgaccgcttacaacaagggccggctgcagtcctccttctggatcgtggacaaacagcacgtgtatatcggcagtgccggtttggactggcaatccctgggacagatgaaagaactcggtgtcatcttctacaactgcagctgcctggtcctagatttacaaaggatatttgctctatatagttcattaaaattcaaaagcagagtgcctcaaacctggtccaaaagactctatggagtctatgacaatgaaaagaaattgcaacttcagttgaatgaaaccaaatctcaagcatttgtatcgaattctccaaaactcttttgccctaaaaacagaagttttgacatagatgccatctacagtgtgatagatgatgccaagcagtatgtgtacatcgctgtcatggactacctgcctatctccagcacaagcaccaaaaggacttactggccagacttggatgcaaaaataagagaagcattagttttacgaagcgttagagttcgactccttttaagcttctggaaggaaactgatccccttacgtttaactttatttcatctcttaaagcgatttgcactgaaatagccaactgcagtttgaaagttaaattttttgatctggaaagagagaatgcttgtgctacaaaagaacaaaagaatcacacctttcctaggttaaatcgcaacaagtacatggtgacagatggagcagcttatattggaaattttgattgggtagggaatgatttcactcagaatgctggcacgggccttgttatcaaccaggcagatgtgaggaacaacagaagcatcattaagcaacttaaagatgtgtttgaaagggactggtattcaccgtatgccaaaaccttacagccaaccaaacagccgaactgctcaagcctgttcaaactcaaacccctctccaacaaaactgccacagacgacacaggcggaaaggatccccggaacgtataacatgatgaagaaactgacaggacagctctgtatttcatatttatacataaaggacttgaggagagaaaaaacactttaatatgtctctttttttagggaaaaagcacacttataaaaaatattctctgaacaacacataatacctatctaacaatatcttagcgtcgtgtacactaaaattaagacttttgtatttgttacctctgacagagaatgtcattctggcgtagaagttagtttttacgtttgcatacaaattttaagactttcattcctgctcctttctagttttagaactttttctgctgacctacccggtcagttgttaggaagcttagcatgaggtgggctctttaacaccattctgagaactgttgatttagagaggaaggtgaggattttgccttggagaagagactgataaaaccaagtgtttattcttgtaaatcgtctccaagacctacacagtcagctaagcatgaatagcttacatctcatgccagccttcaacacccttgaaaaatatccttttctgtcttgctcattttcttcttataccataagttttatttggtatcattttctcttctcacaaaatgttcctattatatagcattttctgtattcacctcaacattacttctaactatgataacatcttttgaaaacatacaaatttttcagaatggatactaagtggaaatagcagtctttcattttcacctttcaactgaatccttttttcccctaccgaattggtatttaaaaaaaatcacagtcagcaatatgtatcctttctctcaagctcagaaaaattatgtagccacctgctaatatccagcaagctatcaagtctgcattttgggaataaagtagtttttcacatttttgttcagtttatggtattataaaggaaaaaatctctatgcgtcagtggattttaatttctttagaatcattatgctgttaagagtatgccagcaaacgtttctagagctatttaatataccttctgctatttaatataccaaatgcttttcagagaaatgcaatttaaatactgtgcttaacatattttactaagaagcagaaatattgaattattgttctataacgtaattgtgtgttgttgttttatatctatacaatatatacccctgtattaatggagaccattgctacactagggagaggcatggcctcttcagagcccacagcaggtggccgggatgtccagttccaatgttgttcccgactctgtgactcaaagcggagcccctcactgcttggcctcgggcttctcttggtaatgtagacggtaataactcacctacctcgcaaggatgttgtcacggtaggaaatatttataacttgttttgaaatcaaaagaacctatataaatgctaagcattataatatataatctttttcttgaaataaactttgtcatatcttgatggaatcaacac

SEQ ID NO: 316 - protein, 444 aa, Homo Sapiens
MRMDSQKKIAKINVGKRIALVENIPEGLNYSENAPFHLSLFQGWMNLLNMAKKSVDIVSSHWDLNHTHPSACQGQRLFEKLLQLTSQNIEIKLVSDVTADSKVLEALKLKGAEVTYMNMTAYNKGRLQSSFWIVDKQHVYIGSAGLDWQSLGQMKELGVIFYNCSCLVLDLQRIFALYSSLKFKSRVPQTWSKRLYGVYDNEKKLQLQLNETKSQAFVSNSPKLFCPKNRSFDIDAIYSVIDDAKQYVYIAVMDYLPISSTSTKRTYWPDLDAKIREALVLRSVRVRLLLSFWKETDPLTFNFISSLKAICTEIANCSLKVKFFDLERENACATKEQKNHTFPRLNRNKYMVTDGAAYIGNFDWVGNDFTQNAGTGLVINQADVRNNRSIIKQLKDVFERDWYSPYAKTLQPTKQPNCSSLFKLKPLSNKTATDDTGGKDPRNV

SEQ ID NO: 317 - DNA, 3002 bp, Homo Sapiens
attctctgcctctgaaggctccagaggctgtgggaagcagcacatcagcgacagctcctggctgctggactccgcagggagggaaggaagattggtcgcaatgtcccagcagaagtgcatcgtgatctttgccctggtgtgctgctttgccattctggttgcactgatcttttcagccgtggacatcatgggagaggatgaggatggactctcagaaaaaaattgccaaaataaatgtcggtaagagaattgccctggtggaaaatattcctgaaggccttaactattcagaaaatgcaccatttcacttatcacttttccaaggctggatgaatttactcaacatggccaaaaagtctgttgacatagtgtcttcccattgggatctcaaccacactcatccatcagcatgtcagggtcaacgtctttttgaaaagttgctccagctgacttcgcaaaatattgaaatcaagctagtgagtgatgtaacagctgattcaaaggtattagaagccttgaaattaaagggagccgaggtgacgtacatgaacatgaccgcttacaacaagggccggctgcagtcctccttctggatcgtggacaaacagcacgtgtatatcggcagtgccggtttggactggcaatccctgggacagatgaaagaactcggtgtcatcttctacaactgcagctgcctggtcctagatttacaaaggatatttgctctatatagttcattaaaattcaaaagcagagtgcctcaaacctggtccaaaagactctatggagtctatgacaatgaaaagaaattgcaacttcagttgaatgaaaccaaatctcaagcatttgtatcgaattctccaaaactcttttgccctaaaaacagaagttttgacatagatgccatctacagtgtgatagatgatgccaagcagtatgtgtacatcgctgtcatggactacctgcctatctccagcacaagcaccaaaaggacttactggccagacttggatgcaaaaataagagaagcattagttttacgaagcgttagagttcgactccttttaagcttctggaaggaaactgatccccttacgtttaactttatttcatctcttaaagcgatttgcactgaaatagccaactgcagtttgaaagttaaattttttgatctggaaagagagaatgcttgtgctacaaaagaacaaaagaatcacacctttcctaggttaaatcgcaacaagtacatggtgacagatggagcagcttatattggaaattttgattgggtagggaatgatttcactcagaatgctggcacgggccttgttatcaaccaggcagatgtgaggaacaacagaagcatcattaagcaacttaaagatgtgtttgaaagggactggtattcaccgtatgccaaaaccttacagccaaccaaacagccgaactgctcaagcctgttcaaactcaaacccctctccaacaaaactgccacagacgacacaggcggaaaggatccccggaacgtataacatgatgaagaaactgacaggacagctctgtatttcatatttatacataaaggacttgaggagagaaaaaacactttaatatgtctctttttttagggaaaaagcacacttataaaaaatattctctgaacaacacataatacctatctaacaatatcttagcgtcgtgtacactaaaattaagacttttgtatttgttacctctgacagagaatgtcattctggcgtagaagttagtttttacgtttgcatacaaattttaagactttcattcctgctcctttctagttttagaactttttctgctgacctacccggtcagttgttaggaagcttagcatgaggtgggctctttaacaccattctgagaactgttgatttagagaggaaggtgaggattttgccttggagaagagactgataaaaccaagtgtttattcttgtaaatcgtctccaagacctacacagtcagctaagcatgaatagcttacatctcatgccagccttcaacacccttgaaaaatatccttttctgtcttgctcattttcttcttataccataagttttatttggtatcattttctcttctcacaaaatgttcctattatatagcattttctgtattcacctcaacattacttctaactatgataacatcttttgaaaacatacaaatttttcagaatggatactaagtggaaatagcagtctttcattttcacctttcaactgaatccttttttcccctaccgaattggtatttaaaaaaaatcacagtcagcaatatgtatcctttctctcaagctcagaaaaattatgtagccacctgctaatatccagcaagctatcaagtctgcattttgggaataaagtagtttttcacatttttgttcagtttatggtattataaaggaaaaaatctctatgcgtcagtggattttaatttctttagaatcattatgctgttaagagtatgccagcaaacgtttctagagctatttaatataccttctgctatttaatataccaaatgcttttcagagaaatgcaatttaaatactgtgcttaacatattttactaagaagcagaaatattgaattattgttctataacgtaattgtgtgttgttgttttatatctatacaatatatacccctgtattaatggagaccattgctacactagggagaggcatggcctcttcagagcccacagcaggtggccgggatgtccagttccaatgttgttcccgactctgtgactcaaagcggagcccctcactgcttggcctcgggcttctcttggtaatgtagacggtaataactcacctacctcgcaaggatgttgtcacggtaggaaatatttataacttgttttgaaatcaaaagaacctatataaatgctaagcattataatatataatctttttcttgaaataaactttgtcatatcttgatggaatcaacac

SEQ ID NO: 318 - protein, 444 aa, Homo Sapiens; identical to SEQ ID NO: 316

SEQ ID NO: 319 - DNA, 199719 bp, Mus Musculus
  misc_feature (1)...(199719): n = A,T,C or G
gtgacagcagcgacaggaagcaggcaggcatcccctcatccccagcgctaggcctgtcctcggaggggtgcactggatactttcccgcataactcccatctctgaccccatggcgaagtccccagggaactctaccctggaggacagtctggggcaataccaacggagtctccggggtgagttgctccgaatctcagtgcctagtagctcttaggtaccacgggcaatagtgggttgttttttgtttttttgtttttgttttgttttgttttttccagagactttccttgagcactagccaggctgtggaggaagacgaccgatgttgctctgaccttatggatgaaatcttttagttttgtttttaggattaagcagcattatccttatccttgtggttggttacctgacccaacaaggaacctacatcttgatttaagtgtcttatcaaccagtgccagcacaaactcatgggcagctccatgccacttttaccctgttgccatactgttgctgtttaattcaataaattccttatttatatttcttacacatgcaaattctggtgtagtatagcaaatctgacgtataagtccagaaagaaaacactaatagttatttgaaataatacaatatctactgatctacattattttcatatagcaaagtatttaaaactttatctcactaatgactccattttactggtcaggaaaccaaagccaaaactcacacagctggttggtagcggcaaaggcatgtactgaattcaggcctatccaccttcaaagcctatgcctttcttattaatcaagtaataattactataatcgaagcctagcttagttaattcaagttttctgagcaaagaaccagaagaataattatctggcaaagtgctctccatactcatagctagctagctctgttcttttgaccacatgtgaaatctccggaaacttgagactttgttatagtgaattcgtggtgtcaactacaacatgattattatggagaacaagttaaccaaaagaataatgaacataagactgatttattttcagaagttaagaaatctgtagcaagaaatgtgtgctaggggctgggaatgtggcttagtattagaatgcttgtctggtgtgtggaaaagaaggaaggagagatgggcaagttaatgtgggacttagaaagatttcactaaagactttattccacgggttatgatgtactttttcctattctgcattttcataaccccatatgctatggccaacagataaaatatttgaatcatttataacctgaattattcagcaaatgataactcaatgcctgatttggattagccatattaggtgatgaatcggccacaagtctctatggtgtggagtctttggattaatgagggagacaataagcaaagcaatcgcagattgctatagttcaaaataagggtgtaaccaatgtttggcacacaaatgcttattgaacgttagctgctagcatttgcttcctttaaaatttaaatccttttctgagaagactagaaagtttatctccgtaggactttgtaggctattgtttgtcatctgtatccattggtggtggtacagattgttagcatcctcagtgttcaaactctaggatggtgtaattaaatgcattcttcctcctactgatattttaagagttggtggattctaaagtaactgctcctaacttttttgtggaatcaagaaaaactcttgtgctcaatgatatacatggttacaatttttttagattggctaagtttttctgtttgttgtggtggtggtggttggttggttagttggttttttcatctagttcttctgtgaaataattttggacctctatttaaccactggaagtggctgtttaatattaatcattttgatgtagtcacatgattgatctgactagggcaatggaatgaagaaatggcagacaaataacaacaagttgggatgcagtgggccaccgtctcagatggagacacagcagcagaagtctgcaaactccgcctcagtcgggagtttctgcaggggaacagtctgatgctgcagtcaattgggatgaggaagctgtggtctgtagtttctgcatttactggttccagctaaatgttaggtgcatccatgcttttaccagggcaagccttgctgctctccagagcctgacctggggaaggtcttgccgctctgatgactctgaggcactgggtccctgacatgactgtgctcatgtcaataacacacagttactcaagacttcatttcctcccatacattgggggattgtttaatattaagcgtttaatatagttatagggctaatttcaaactaattttatagaagtgggtatagcttgacagagtagcacttgcttaggcctggacaaggtcctgagttcaatccccagcaccataaaagacaaatcttttaatgatttgtgtggctgtactgctatggcttccagtaataataacatgaagttctaattaagataattttaaaatttatagttggggtgataaccatttgaggtaaaaacatttgaccaatggcaaataagagccattgagaaaaagagatgaacgtttgaaaaaattaaggcatcattcctcctggctttcaggatgtatcgtttcttgatttagtgacttactttcatgtgtttcttagcatatgcagccatatctagaaggaggccacaaaatggggtcagttctgaccttgagcatagtcaaatatctgttaccacttctagagagaataattcctttaaactaaacctttgtttccaagaggtcaaactgtgttgaatataacaccatttgttatttcaagagtgcccagtgtttaagaattgtgttataaattgtcctccttagtttatgcgtactagaagaataataaagtattggtatttcttcctatttcttcctgagattttaaaacaagtgtatattcactaattgctagtattctttctttttatgaaataaccatagctgcaatcaagcttccagcatagtcaaagcgagcatatcgccggtgtcctgggagccaccactcaatctgggactagaagggattgggaaggcctcttggcaggtggccacgtgtttatttactagatgttttaagtgttaacacatttgagcatgcacttttagtgttaaaaaggacagagatcacaaggtaatggattatctctccctactaccagagccatgtgccgtcctgtgcatcctggggtgtggatgcagtttatcagcaacccaggtatcacctgaccaaaagagtcctccccacctttggctgagtaggtttaccattcaaccaagcctgtgctttgacaggaacacactctgtctctcttacgtgcagtctgtgtgcaccttccccctttgctttcaccacattggtttctcagcctgtggatggaatctgtggagaacatgaccgagtcaggagagaatgtgtgactaggcagcagatcatggaacttcctgttgatttgctgattagtatctgtgtgaccttggaccagttaataagttggatttggatttatgtttccttatctgcacaattaaaagcttgaaccagatgtgagaattattgcctgtgggagccaagatggcaaagtgtgtatgggacttggtgaaagacactcagaaaagaacaggagtgtgggtgtgctgtactttgtgcttttcattttcttctggctttcttctcccctgctttccctatttttctgctctttagctaagaagaaagccaagcactagcctacctaagagccgagatccccctctgtctcctcgagtgccagtgcccttttcctgctctgagtcagactgcaagaagggtagggattgtgctcgtgccttgtgaaacggaagagaagttgacctgctgcctgggaagggagcagggccatggcaagaacaccttgaggacggtgcttccttctgtgcctgatgcagctgggaacagctggagatagtgttgatggtggatgacttactgggtgtgaacggcacagctctctagatcctgctatctgccgaagggttgtgtaataacactactaatggagagttttgtatgtgtgccagctagcagtgatgtcatctggacctttggcctacttaagcacacatgtttaatttcggggaaagttactctttttctcagatttacttacaaaactttcatttcttcttttctatttccatcaacatttgcttggtttttctttttattatttgccatgtattatttgtatttatatgtctgtaggtacacacacaacacacacagacacacacatacatatgtaagcactttaggagggtgtaaaaattatgagcatttttgtttatacattcatgttggttttaacacttttagctttttatgggtttttttgtttgtttgtttgttttttaactagaacaaaacccaaaaagcaaggcatgatgaaataggccattccagtgctgaggaggccgacgcaggatttctagttcaaggctacttagggtagttgaaaacaaaagttaaaaacaaaatcccaacttcctttttcctccactactgaggcaaaataggcaaaagagatttaacaacaacaaaaaagggtgttcacagtagtcagccctacaacaggcagaaagggtgttcacagtagtcaccctacaacaggcagaaagggtattcacagtagtcaccctacaacaggcagaaagggtgttcacagtagtcaccctacaacaggcagaaagggtgttcacagtagtcaccctacaacagacagaaagggtgttcacaatagtcatcccaactacagacaaaggatgttcacaatagtcagcctacaacagacagaaagggtgttcatagaggcagccctgaaaccataactgtttccaatgtgttataaaattataagggtactttactgtgtttctagaaagaagatgacaagctattgggaaaatgagaaaaattttactctttctatcttggtgtctttgaggatttgaacttcagtgacattaactgctcatgacaaagttttcacatgagtccaaaggtaaagaaagtatcctgatccctttagcacacatcccagaaacctggatcattaagtccactgaaaggttcgaaggagtagacctagagctgatactggatcaggctttggttatattctgccttaccagcactagtaacatcagcgtgttattattaatgctgcccacctcatcgaaaggcggctactgctgcagtaatagtgtggtatgcatggtgggtttaacacttacagtgggactagctcttcaaggctcagcaggagctgcattgagctcaaccagggattctcaactagggataatttgtctggcaagcaaacatttagtaatatctacaggcatagttgatcatcacaattgggggtagaaaggagtgatactgacagctcatgagtagaagccagggacactggcaaagatgcatagcccagttcctaagacagagttatcaggcctgaaacagtaatggcactgtgttcagaaacaatgatgtagccattgcaaggctttgcaagagactcaagaaagagtaattatgaatatagattgtattgtctggtgcatctaccccacatctctgccaggccagctggaatttatgccctattggcaaaaggtgcattagtctgccagactggtcccagtgaggtgtcaggtgcatgtcacaggatggacataaccagtctcagactttccacatcatacctctccttgataatcttctaggccccgctttcttacatcagtcactgtcactgaggttgtctttccactggggccatccacttcagcacgttttcagccattagagttaggatcacagttttgttgagacatttttatttctgtatagttctattagccactttgactattgtgctggctgcttacagacttggctctgtccatctttggaggagactgctcttttcatgattttgctacctgctagttccctagtaaaccatgatagtcatcttctaaaccgggctgtagtcccgtcaggtataaacagacacgtttttcttgtcttcctgtggttggttggcttctctctctctctctctctccctctctctctctctctctttctttttcctgcttgtctgcctagtctaagcttgtgtcaggaactgcagcgccgctcacatatcaggctaggaaatggttcattgtatgttttctcagagacagctgggcactttgcaggatgggtcccctcccctgacactaggacatttctctttcatatctccttggcagatggaaaatatagaaattaataattgattggatgaatgtagtctttggtcttaacactgagggacacttgtgtttttctcaaaaacatgttacttttacccctagccgaggagctattgacaaatgctgtgctggcttggtggtggggtggggtagaggtccttcttcttcagtggtgtagctactggtaagttaaatgttcctaaatagctcctcacccatactcatgcaggcagtcctagttaaactcccggtgggtttataaagcaacaacaacaaaataaaccacttgtaaataggagaagatgttgggggagcaggaaggggtctagagcgagtggaagttggtaagggagagtagtcgatgttgaatatgatcaaaaccataattgcacataattgtcaaggcttaaagctatcttttaaaaagttaacgtttatgaagagaggctcactggtgtgccaggggttaaaataagatagattggactgagaaatgagtaagacagactttgacttaagtcttcggcttaaaaacctttttaggagctcattgtactgactgatgtttagataatgggacagaaataatgttcacttgcatttatattcctgtgacttgccagatgcagcagttttgtttgcatttatattcatagttaaatttatatacagcccgcagttggtgctggagagaagaaatcaggatgtattctgaaataggtgagtggcctcagagaacagaggaaatggatattctttctggctctctgttagataaagctgtcgccatgagcagcagggtaggaaatgataaagggccctcctgtctaatctgtttcctcacttatgggccccagtgagctgcagctggtgagtggtggatgatgggcagttctgtggcagtggctccagctgaagagtcatggcatttcatttgtcttgaatcgtcttaatttacccctcaggattaagtcagtttgtcatgctgctgtcaagaattgaaacacttagagtgctttgaaatgttatgctaaaatgattttaaaatgtcatttaacttgatcttagttttaggttttagttcttgcaaagatctcttctctgacccttataactactgattgagtacttgcaaaaacagaacagatcaaccaaaattctcttttagagggaggttaattgttgagctcagtgcctagtaatttcatgtattatctttgatgcgatttagcatgcaatgctggtgtggctctgaaagactgaatagaatagtgttagaaacaggactgaaagtgttgctgcaagttagcccacaggctagggatgtggctcagtggtagagcctttgcccagcatcccataggcccagagttcaacgccagccctacaaaataaatatataagcctgccattattataataaatatataagcctgccattattatcatcttgtgaaagaactgtactcgcagggacttactgttgtgcatttttcccatgtaaatttttcctaatataactttttagcttttattagagtaggtataaataaataattattctttgtcttagaaatgaagtaatttgatagctctgtggagaatactttcaatgttagtcaaaccctctgtttcctttctcatggatgctacaaagccaagtgctttatagatttaagggcataaatctaaatgtccgaaatgcagtgcacgtcagaacactttggttttccttttccattgacaagtctgtttagaaaatattgagttttagaaaaccactgctgctccttgtcatgctaaaacaggcctgcatctaatccggactttctttaacccagagtgagtaagaaggggccagacctagttatcactcagcaccaggtttgtgtttagaagaaggtctgtgtggaaatcagatcggaatggaggaagagtggtactaagctcaccatgaagacaataggatttcatcttccatttcagaccaggaaggctggttctttttagtgttattcatgtagaggatgagtttctgtaagtaaagtaaccatattgcatattttgtaacatggagtattaagtaataaaacttaaaagttaataacattggagaaaatgaagaacatatgttcataaaatgtgttttcatagatgactgataatgataattatcagtctgattgtgtgtgtgttcatgttcttatgattgtgtgtgtgcatatggagaaagaggatagcttcagtgtctttccttgattgctctcttcttttctcttttgagatgtaagctgaaattgataaatcaatttagactggctgaccaatgaaactcagcaatctacctgttcttgccctcaccagcaatgggattacgtgtgtgctccgccacatgcagcgttttacaaagggttttggggatctgaatctagaccctcatgtttgcagagcaagcactttactaactcaattttctccccagcttcattttcatgccattacagttaaatgatctctggaatcttttgaaggctacactgagcagttaggtggaagacaggtagagtagaggagcccctagcagtctcagagcctgtccccttcccctgtctccccaacagggtggccagtgcttaaatagtcattcaagacagagaaagtaaaacctgctgacccttgtaaagatgagctgtaactgtcagtgcagcctgctagtgcaaatttaggcgtgtgaggaagtgcagtgtgaccctgacgctatttttagacacgagctatcataacagtataccttattcaatcatagatagcttatgtcactgtgtgctggtcagtttcagtttttgctctaggggcggtcatttctgctaaccaagtatctgtgtgtgagatggagtcagccaggactgcacagtcggggttgccactgtgcttgctaaccctgctggccaactctcgatcgtagggcaggcggcttgaatcatttggtggggcaggaatatggacatggagagatgtagagaaagtgaggcttccctaggccagagcttggagtgactgagtctcctgaatggttctgtctgctcacctcatatctctaggtgggataggcgagtcccaagcaccaaggaaaaggaagaaacctccacaaggcagtgattatcagggagctctgctattcagtcttccttgctgcttgtattacacacactgaatgttcatgctagccagatcagggactgtagagatccccaagtctaatttctagctggatttcatcttctcttttgtcctctatctcttagctagctgaagctagagttctgctctgggccataaggttcccctaaaacagatccgccttttgacgatgcctgttgatcaaggatttgggtgattgacaccactttagtggccctgactctcatcaggtttttgttgcagaacgtgccaatagaagcattcaccagttgaaatgtgccctgagagaagtggatgtcactgtagaagaagatgcactggatccttccaccagcatcaacgtagaaaatgaggacacaggggtggcctggcatgagctgcagcacagccatgctggtgagtgtgactgtcagctggagcctggctcatagtgggctctcccaactccataggcttccctccgcccagttggccactctactgctacgtttctattgctgtgtaacaaaagagcaataaaattcctttactcagctttcttcttttaacttccaaaatcctatagactgacgtccaaaatccttaggatggattaacaatattttcctaatgtaacagtatttcccagtcctattttttccatgctgtcttcttagccacccttttcacaagcctcatctgagccatctgtcttacaaagcagccatctcttagcaacccctgaccatgcgtgtataccttgacacctgcagtgccttgtgactgaaacccctgacatctttccactcttttaagcatgctgaactcctgttcactgctgctgttagcgcctatgtgaaagcaagcatgaattgtgttccctgcccttgaagccttatgcgcagctctcggtttacgttaaaagcttatagctactgctataactgttggtttattaaattcttactcaagaggtagagttctgatttttttttctttgtgtcccagccaatagcaaagttcttgtctaatagaagtttaagtagtatttgttggattgatgtttagtagtaaaatgttagtctactttctatcactatagcaacatctgagataaacaaacctatagagaatatactttgtttgtttgtttgtttgttttttgagtcgggtctcagtatgaatccctggatagccaggaaccctctttgtaggcaaggtgggctgggactggtggtcttgcccctgtctgtgtctcccaagtgatgatattactggggtctgccagcataccttacaggtttgttttggttctagttttgcacgattcagcccattattgattggctttgcttctggacatgtgtcagggcagcccatcagggaggtgcatgcagatgggcaaggctacttacctcccgacaggaagggaaaaagaggaagaagaggccggatcccactctccccagtgacttgaagacttcctccacttaatagcttgataatcaaatttaatttaataatttgttttaataatcaaatccccagctcttcactaggtcctacctcttctaatttcttttatctcccattaatgttaagtgagggcatattctttgctgtgtggcctttgagggacatgtatagcctgagctgtgcataacctgtgaatctcaagcaaggccgataaatccattgctttcgccctgcagtcagtcaactgaaagctttgttgcgtcaacaaacaaataaggaaaatgagacatctccaccgcgaagacgaaagttgtccccttcggtgagtgtcaccctttgaagcccgacaaaagccctggcctcccagcttagcttcagtttcctgtgccacttcgtgtgtgttgcacaaggtcgtgtgtgttgcacaaggtcgtgtgtgttgcacaaggtccagattacagccagagtagctctagagaagcattcttccacttgagctgaaggaatcttcatcttttcaatttattttttttcttcaaatacgtggtccagagaacagcttgataaatgtattttgcaacagttagtgagtttgtaaaagcgacagtcaatacaaaggcctaacggtttcgtaatattttttacaagttcatgtctatatttgatcatttgtcgaagttactaattgtaatgttaggccctctcccttgtaatgccattttatttagtgttataattagtgagaaattatgaatcatttcttggaaattatatatactttgaagagtttgttaaagcttggatatctatgtattcaaaattttttttaaaaaacctagatttactgtccatctcaatggtgcctggttttactcttataaaacccacatgcttctaacatgctgtattatgttatgagagtgtatttaatggtagatcctgacatggtagtgacttctaattagcacagctcatagttagtatgtataaatacacagtggaggttcccacactattatatgtactcttgtaaatagacctgtacgtttgtatagcagccactctgtgtggtagagaaccttcctacctacctgacccagtagctccacatcccaggactcagctctgtcttctaagctgataagcacatctgagtatgcaacagctctagcaacttcctctaattgacttgaaagcactccattcaccttttgctcttcagagcattctagaaaccaaaagcgagcagtagtaaatgcactgagtgataaaatgtgttgttataaaattataatcaatagctataaatattgaatatacgagtgaagtgaatatctgtaaagtaagaattaagcataaaagtacgtgcttggaaggatgcagtgcccctatgagggtgccattatgacactgtgtgagtcgagggacgccactcgtttctggagtgcagcatgcaggtttcatgctcagttgttctggatcagagaccaggaaatgggggaagagttggagcacatgaagattcctaggattcagactctggagagcagcatcagggtgcagatctaactttcttgtttagcacataagctgacatacagcttttagggtatggttatgtattcaagaacaaactggggcacagcatgtgtggtttagctggatctgactcatctgtccttgagcctgtaggggaggggccagtgatgcggtcagggaaagcagccaccgccctggccttgcctgcagccacctcagatcatctgtagctagatcaggacacttgaggagttgcagaagcctatagcatttctctccgccccacttgttcccccaccaggtttatttccacatcatctgcaagttgtcacacatactggaatcattaggtggccactgctactatgatgtgttaatatttatgtcatactttatgggtttctaaagaattctaactatatcacttcttttatgattgcagaaattccaggactcaggcacagtgctcttttagcaagcctgtgacataactgggtggacctgaggcctagactatgatttgatctggttcagagttgattcttttcgactcagcccagctcttgctacagaaaatactttagccaggaataatactctgccaaagctataaaaatcaactgagtgaggaagaaaagttccctttgcaagccttctggtcaggctgactggttgactctcatttcccttttcctgatttcatcttccttaaaacccaacagcagtagacctttttctgaagtgtctcctcgggctacacagtgcagcttgtgtatctcctgtagggtgcagccttagaggatctgcgcaccagaatgcataattttgaattgctgctagactgtgtttacacctccacttctacacgcctctgggcctaaaaaatccattcagcagcaacaacaaaaaattgaaagctcaaaatctcgcttttctagtgtgacctttgaaacagaattttgcttccctggtgtgcctttgacttgtgatgtctcttccttgacgagctgatgtgaatttcaggagacacgcctcttctgtggcaccattcatgaaagaaatgtcacattgtgaagtagttaagcaggtagcccattccaagccagttataatatcctgttctgaaaaggaaactccatgtgtcatgtgcttttaataactgttattttctgcctttcaaaaatgatattcatgtcttatacttggagaatttatagactagagaaataaatactctgtacgctgtgatctagtacactgtggtctagtctttcttatgtcgcaccagcactaagttgtgcgtagagagggtaaccagatgattctctgctaaatctggagcagcttaattcgtcctttctgttgtagcggccgtcagaatgtgacgatggcagcatgcccaccatgcacaacctcgttcctatcattaacgaccagtctcaatatatccaccacttagaagcagaagtcaagttctgcaaggtaagctgctcatcaggacctcaatgcatgccagtcgtacctcgtatagaagcttgcagttcgtagttttcatgcttactgtgatccactgaaaataactattcttatggtctactgtccgtcatgccatttctgattggtttattgctcagtagttttgttattttgttgttaaagttggtgttaatgctatacgtagtgtactaagtgataataactagtttcagtagctgtgctggtttgtgtttgtcaacttcaacacaagcagagccctctcggaagagggaaccttggttgagaaagtgcctccatcagattgacttgtgaacatgtctgtggggcactctcttagtactggttgctatgtccactgtgggcagtgctgtgccttgtaaaagaaagcaagccaagtgaatcataaaaatccagccagtgagcgagtcctttgtggcctgtgctctagctcctgctctcagctcctgcttcgagttcctgccctgtcttccttcagtgatggactgtaatcagaatgtatacgctaaataaaccctttcctcccccaatttgcttatggtatttctcacagaactaaggcctaacacagtagaactggcatttactgtgaggcttcacagttttatgattagaagttaggctatttttatggtttgctcttattatggacatcagactaaaatttcttctgtggtcttggaattgtctcctctgctgtcttcagggttccctagagagtctttgaaagaatttctgtaggttgaatttctcctctgttacaagagagccctactggtatggaaagtcatgggggagacaaggtgtcgtccaatcctgtgagtccctttctcacttcactgaacccataaacgttttcataaagccggtgcctataggtcctttgaagtatttctgcccgagtaaggccttgttatagaggagacaggtcctgggcatatttcataggcaccgcctgccccttcctggcatgagtaaattcatttctaacttttaccttgagtacttggtagccagggaattcaaacgctgagggctcctagatctcccaagagtctttagaccttaaactgacccacagtgagccttgagtcagttatcacttggattcttctccctgagtattggcttctgcagaggtttcgtaaaggtttctgttccagtgtggtagttctaagcatgttttctctgacttaagggcacggctttctctgcgacttcaactctgaggtgggtctgagaagaatttttattagagagattgatttgatactttctaacttaattacatgttggactaagaactggacttttggaacttattttttcagtcacaacatttaattacagtttttttcctaaggtaggcaaaaggaatctgcatattacacaatagcttttgactgtagtagcaatgaatagtagcatacatatatctgtatttttgagttttttttgttttgttttgttttgttttcagaaagtaagttaccactcagtagctattcaagttgtgacttcctcagttgcttatattacatgatgctaggccagtgataatatataaataaaagtgctcaaactttattccagtctgcttcatttgtacttcttctgggtaccagttgataaatactgcatatttctatgccttggctctctccctccatttagtcctcatatgttattgacatttaatcattggtaggtagtactttacttaattttcaacagattgcctcattttgaaaaatctcttagataaccattttaactaagacttttctttgattccttgtagaaacaaaataataacaccttgtggtatggctaccagcagacgtcaactatcccttaagtaacccaaatactagatatttcctagagctgggtttcctttcttaccttaatatatttgttgtacatcaggaatttgatggtgtaaatcttccataatttatttcatgttgaattccaagtaattaattaatatgtgtttctttaaaacgttaatgtgttttgatttctgctttttaaaggatgaattgtctggaatgaaaaatagggtgcaagtagttgtacttgagaatgaaaggctccagcaagaactgaaatctcaaagaccggaggagacattgagggagcaaacattcctggatgcatctgtgagtggtgtttataaccgtaatcttttattttgaatgtttcttcctacccttttcccagcttttcaacttgttccaaccttttgacaaaatagtatttttttacgaagttcatactcaagaactatgaagttgagttgtaaagaaaaaaaaccccacaagctaactaactcatggtactttaaataagtcaatgatttggtgttgggctacattacactgaaagctgttctggggtgcatatgtcccataatccataatttggacatacttgttccatttggtgagaatgccatgctcagatttgcatggtgctttaatagttagactcagctgtggtggagtgggtcttcaggtgacagaacctgggcctggaggtccccggtgtcttccatatggaaggaggaaccagcaaggagggaatgtgtcacataggaggcactgagccagtctaggaatgcttcagcatctcaccccgatctgttgactttctctgcatttctcttgagctctaacatcttagatgagcagcactgtgtggtaggaagaaccctggcctgtgagtctgagaatcaagattctgttctgcgtctgcaccgtttgtttgtcctggtatttactaagtagtgtgatcagccttgctcatagtaattagttcctttaatggtgatttgagaagctttacccttgtcagggtctacaatgagagttcctgggctccatcccctgagagtccccaagatttttctggtctggttagatcctaggaatgtgagcctcaggctgcctcttgtctctagtgtcatcggcccagactttgaagaatggatcaatgctctttagactctctagagaccgtttagattctgtagagtctaaagacccctgcaagttatacaaactctaccttccatggggcagttctgatgtttgtggttgcagcttactttgtcatagactttgtggtttctagatgtaggcatcattagtaaatcatatctatgaagaataatatgtgagagtcttgatgatgtagttaagtgtcatctgattttggttttgtagcttacttcccctagacggacccagcatttcctttctggtccttgaggtctgtgtgtgtgtgtgtgtgtgtgtgtatgtgtgtgtgtgtgtgttggctgttcagaagcatctggttgtgttgactttgaaaactcatcagtgggctgatgattagtattcggtttgttttctgtgctgacatttacatttgtgacaagctacttactcctttatataaaattattttgaagctttataagattactaatattggtggttaaacattccaccttagtgcttataattttgatgtcaaattgaaaaaaaaaaggtatcatccaataaaaagtccttggatatagctccttagaaaaatagtcctgtgctgttcttgtaaatatataatcatggagcagtgagtcaattattcatcgcctcaatatttatacagtgacaaagaagtgggaagaagaggaagtgaagtgagagaggaaatcaggcagacgagtgagtaagaggcagggggcatgagcagggaaggaagcgatggtcgcagcacatctgcctttcagtctgagcaaagaggatttgccaaaaggaaactacagtcataatcatagacaagacaaggttctaggggctatgatgtcgatcttactcattcccgtgtagtgaaaggcatgcaaacccgggaataactgtagtaggtgtactggccagccctttagcctctgtgacatcactgttgttgcacagttgtgcttgctgcttgcttgggtaggtaaacaggtctttctccagtgctttcttgatacagtgttgaaattaatatgaataaaactttttagcatatcttaaatgttggtgagttaggaatattatcttcctcaaggaaaaataggcttttttagtgactcagatattcatactaaatctcagcagtgctttaggttaatttgaacttagatttcctagtgtcacactatcctcttctgtaaaagactgcaataatatatagtaattaccatttgttctgactgcatgggtatgtatcaggcactgcatcaagcctgttattttccttgtattatttcagtttcacaatagccatgcaaggcaagtgctactatttgtgtttaagaggagaaagttaaaatatgtagtagttaagtaactgactctctgtcacagagctacaaaatggtgaagcaagaactggagcccaggctgtcttgacccccttgaatgcagttacctaagctcatgttttgttccctgtttgtataaattagtaagagatgcttgcattgaaccaaaccataatgcccagaggtttctcccagaaaagaaagaactgtgttcctcaattctctctctgcacttgcaggcaagcccccaagatttggaacttctgggtgggttcattacctagatgttatagaggaatggtaatggtattattaaaactaaaactattcacagtatgcatcaatcatcttttaaaatcatagtttaacccccatgaaagtttcctgtcagaaaagcgttctctgtagctaaaaagtataatataaaaaaatatgttacttattagagatttttggcactaacttaaagatctaggataggacttataagtagaaagtttctgggtcagtttctgtactaatatttcctacagtaagtaaataagaagttttcaatggttttaaggatttaaaaaattggttaaatactattcaagtttttaaaagtgatctgtagaagacaagcacttatttctaaagaataataatatttctatcaagggcctgcaatccgtggtctgtagccagcttctctagagaaattattacctcatcctggattgatttcagaagcaacagaatatgagcagatcttgtaagacatagccctacttacacaatagtttgcagacgtgttggcctgggacccggattcattccctggcctccttctctccccaccctctactttatctctttcttagtcagggtttctattcctgcacaaacaagaagcaagttgaggaggaaagggtttatccagcttacacttccacactgctgttcatcaccaaaggaagtctggactgaaactcaagcaggttaggaagcaggagctgatgcagaggccatggagggatgttccttactagcttgcttcccctggcttgctcagcctgctctcttatagaacccaagactaccagcccagggatggcactactctcaatgggcggggcctattgatcactaattgagaaaatgccccacagctgcatctcatggaggcatttccccaactgaagctcctttctctgtgataactccagcttgtgtcaaggtaacacacaaaaccagccagtacacctctgttaattgtaactttaatttttcaaattcttaaatgagttaaccctcttttagcccaccacccaacagaaggtgggaaagaaaggatatgggggaagtggacctgtttagaaaacttctttggagcaactcctgtctgtgttgtctggaaatctgcagttcagtttacaggttagcagatggcggcaacaaacttttcacagatacacagcagtgcagttcagtagagttgggatagcaaacacgaatcaacagtggagacatgacctagcagagataacctggccatagcttcagcttgagtcagcaggaaggacccagaggaatgccctgagaagttcctggttgtgcctctcctctcagcagtgatcagcaatgctgcgagactgacaaactgttgcacagctagctctctaaacaagccaagctcagcctctgccactgtccgtcaagttctatttagtccctccatagatcacgtgtcctccacatgccttgcctcagcacaatcgcctgtctcagctggcatcactctgccaatcagcccgagtccttggaagcatcaagaagctgcagcacaccaccagaagttttttggtgcatttctctctatggcgtcctggcaaaatacagctcaactacacaatgtaaagctgaccagtacatgcatgttgttatcgaagaatccttcatcaggtatcctttcttgctttagcagaacatcctctctcctgtgtcagcttcaacaaaacgtttcttcaggagtctgccttagcctttcacacctgtgtccactttaacgcaacggcaacattccttcacgtgtttgccccagcaaaacaccatcccaccgactttccaaagaaccctcaagtttccacttcccttaacagtgatgcaggatggtggcagcggcggcagcctaagcagcagcagtcccaggcgcacacgccagctcgcctgctctcgctgctcttgccctctccagctctctccatcccgtctaccgaaaggtgctgggcggatccggggcggtggaggccgagcggctgcagtggcggtaccggcggaggcagtggtagcggcggcgggaggcaggatgagcgcacgcggtaagggcgccgggcagccttccacatcagcccaggggcaacctgccgcccgggtgccacagaagcgaggacgcggccgacccaggaagcagcagcaagagccaacctcctaagctcctgtgagccctctcctaagagacccagaggaagacccaaaggcagcaaaaacaagagtccctctaaagcagcccagaagaaagcagagaccattggagaaaaaacggccaagaggaaatggccacaacaagtcgttcagaagaagcctgctcaggagactgaagagacatcctggcaagagtccgcagaggaggattagggggcgccgacattcaatttctacctcagcatcagatggatcttttgaagggagaagacaccgcagtgaccacttattcttaactgccacgatctttctactttctgcggggtggggcaggggcggggctgggcgaggggcggggccggggtgggagaaatcgcataaccttgagaaggactatattaatcactttgtaatcccttcacagtcccaggtttagtgaaaaactgctgtaaacacggggaacacagtttaacaatgcaacttttaatgactgttttctttttccttaacttactaatagtatgtggatctgataagcaagggtgtgtggttgaagaaaacctctgtggtgggcttaatcagtcactacatgcaaaccctaaaccggcaccctggtgaccgggggcattcgtataagaaaagcattgtgtgtgactctgtgtccactcagatgccacccccaccatgatcatagaaaatctgcttaggacaccaaagatgagaactagacactactctcctttgtgtataatcttgtagacacttacttgatttttttttctttttttacttttcaattctgaatgagacaaaatgctggtgtatcttttaatacagctagcaaaccagaataagttatgctcgttttttgtcttgttttgtttttttcaaaaagggaagtaaacgagaaccgttgactcctccgtttatggactcacacacagcagcaggagtgataagcccacaagctctctttcccgcctcgggaaatctacacagccaaaagccacttagccataaatgacacttgtcagccttgaagcatccgagataactagctgagtaaaatgatccttttttggaatttaatgaaaaggttaacagtacccaatgaacccacccaagtgatgacgtgggaggagcgaaaccgaaatctctcttgctatataaaggacactattttttaaaaaataataataaaaacagctcccgctcgctctcctctctccctcccttctctccctcgcctctctctcctctctatattctctgttcttcattgtgtaccagtgtcagtgaaagaccgcagtaccacttacctcagatgaagcctgagtgttacgtcctgtaacacctttcgttttgacataagatggctagcccgggtgcattatcttggttcggactgccatctctgcattcacgatgcacttttagccagagatgcaataatccctacactcaatactacctctgaatgctacagtgaatttacagccctgcacttgttacacgctgctagacacaagccctgcaagagaaagggggaaaaaaaaaaccccaccaaaaccaaaccaaaccttactgggtcggcatctcagccatccccagttctcgaccattcttgtctgtactcttactccatctcagcaggctatgcatgtttctatgacttttttttttaaattaaaatgttacaaatgcttgtggcagctttcctgctagattgttacattaatttgaaacagttttgagtcaagatgctcctaggttcttaaggagaatttatttttcagtggcactactttgtatcacacacacacacacatctgtagtgttcaaatataagtctccaagtttgtacctcaaatgaattattgaaacaaatggacttcctgatttgcaaggaactacctccacacttccaaaggaacaaacttgcagcctatatcgctcattgatttccttcccccatgtttgaaggagttcaaacctcacctctccctcatcgaaactattttttttgtaaaagacacttgatagaaacacaattttttacatacttttgcaaaaataaatgaattaaaatcaagccaaccttcaaagaaacttgaaattttgctacaaccagctcagccttttgcctaatgcaatgaaaaaggaaaaaaatagatttctaagattagttgcctagaagaatatgcttgaccgatattttttcatgtattttacacaatgtgatttttgtaaaaaaatgtctcaagcagatttgttttggacgcttcttgtgtagagtttctatgcctttctctcctattaagtgtgctgactttccagagtgttacccactgggccaggaggtggtttctcatagtggcttgtgtcagtataagttaatactgaagccaaatgaaacaaacaaacaaacaaacaaccatgtctctttcagctgttttcagggaggtcacttcaaaggccacgtgccgctctgagactggcagatggctcactgtcttgagttgccaaaggagctatggagagattaaaactcaacgtgactgttaacaatgcattaaataatcaaataaaaagtggcttataaatatcagattctcattccaggtcttcggatgggccttacagaaacctcattttggccagctcataaaaactgaagcagtttctcgtgttggccagactcggcacaccgagcaatttccatctctgatgaagttattccttatttcctgtatgttgtacaatcaaaacacactactacctcttaagtcccagtatacctcatttttcatactgaaaaaaaagaaaaagagagagaaaaaaaaggcttctgtccaatggaacagtgagaacatcataaaatttttatatatatagtttatttttatgggagataaattttataagactgttttttactgttgttggtcacagctaagtaaaactggacatctaacttctctaccatttctgtgagctaagtatgtttgcaggaaaaacttatcaagacgattaactgcatccaaccttctccctgttcctttgtgcgccctctgacttatttctctgttccttgtgtagagtcgctgtctgtgattgtgcttggatggcttgcttgtggcaataccttctctagtggattatcactgtctgcacaataaacataacagcctctgtgggaaaaaaaacagtgatgcaaactgcctgtgaatctgtgaatgttcttgcagggtggggctcctctccccacccagcttcttgggaggctgcccctttatggaagggtttgttcatctaaatgacacactaggaccacaacttctccagaaaactaattgaaatttctcattgctctcaatgtccaacatcctctcttgtgagttggtcctaagatatgaggattgcagagtcttcaatgtcttttaagaactgagcttttcttgacttggagctatgatcctgaaaacctcaattgccacaaaagccaatgactttcaagtttttgtctaaaataaaagaataatggattagagaaatgaaatacacagatcatagagggtcagttttagagaaaagtttattatagcacaatgatgtgttcaccaacccagaaattctccaaccccctgtcatatggaattttaagaaggctccttacataggcatggttgatttgttaatgaccaaacaaaccagtatccatttgcaagtcagtctccagctctcctatcctcagagaacagggaggccaagagtttccccttctaacaagatttctggtaaaccctgccccccttcatgaagccatggaggaacccatgtcatctaattagcataaacgtccccatcactcacggtcatgaaggtcttaggacctcttgtattgacagttgtgcactaatacccagtatcataccaaactatggtctttttcactctaaaattgtcaggagttttggaagcactatcaggaatccagagcggagaacacccatgtctctctcattgtgtaaaaagcatgaacatactgcagccagataaatccttacaatttatccttggggctcttagcaaattatatgaagtacacaaaaaatgtctaacatgttttcaactatgattattagcatctatggaatatggaaaatataagactgtcagtttccagagtgtctgttttctgagaatgttgaatacacaggcatcaggcttctctgtggatatttgcattattccctgcatatgtgggcacttgaccctttaatacccactgtctagcacagcctgtgtgtgcacatgttccgcatggctgggaatcatgattccatttatagtctgcatgtttacttaatgttgaatatcagctgcagctaatggcgtgttttattttagggaaacatgcagaattcttggattatgacacgagaagattctagggtggatgaagctgcaaagagaccattttctcatggtgatgctgaaactggcaaaactgcatccactggtgatgccaataagtggaagctggagctggtgagtgtggagtgcttctgcacctctgtttcttctcatctcaggtcgctcttcacttttgcccttcggccttagtcatttcagtcgctctctgttccacttgctcaatccagtcttgaacccctccaatggatttgccaagtctgttattgagatttttctgttctagattctcggttcccttctaaaacagcccctgctttctccaggtcttagcctatgtttccccttgttctttggatgtacaggaggcaattgcttatagccttttctttagtaagtctgatgtctggtttctcacagattgttttttttttttcttttttcaatttatcctgttcatgaccctacacttttatctcctttactccgcaaactttcccagacagttgaatatattcttatctgtactccttgtctcctgttttcactgtaacacctgagagcacattcagcctgctcattttacagttgcaagtgatttctacctagtaatagttttgataccacatggaccagttcgacatcctctttcccaacattcttcctgcacaacgcaatttgagttcattaaagtactcaaaagtttacagcctagtgattttctctgaaagagtactcaggaaattttggatcaagatttttttttccatccttgtacatccttgctgtgttccctgccacccagtgtctctgcactccatagctaatcaacatcctgacttccatgagcatttgccaagaacacattactaaacattctacttgaatgtgcgaattaagggaagcttatatagatggagccttacaacggtatccgttctttaatttagctcccctttctttctccttcttcatcttccttaccccttttctcttttaactttagtttggcttttagagacagggtctcatattgcccagggtggcatcgaattcactgtggtaccaaatttggctttgaactcaatcctcctgcctctgcttctcaagtgctggcattacatgtatgtcccaaccatttgtctttgtttcctaccattgcatttctagatctgtccatgttactgcatgtagcaaaagagtagcaattttcattgaggagccaccaaatgaatgtaccataagtgacttatctagtgctgatggatatttgttgtgcttctagcttggtgcttgtgtgagtatttctgcagagaacattcattatgtctgtgggcatgcacctcacacattcttggtcttaggctatgttagtgttcgacttgaattgattatcaatggctgtcttctacgaagtgctttaccagtttataccctatacatggtacaggacttatcctgaagtccacacccctttttatacactgttggcagtttttctaatgatcttgtgtgtatttgcttggggttttttggggtttttttgtttgtttattttttgggtttttttgtaatgagtctgtttcgtacacggtctctctaggctggtctggaactcatcatgagcccaggctacccttgagcttatagcaaagtatgctgtatagtgtttctgctccttgatatattatgtttatttgatatgttgatttggggaatacacacacacacacacacacacacacacacacacacacatacacacacacacatatacttacacatgctttactatgtgtagtaagttttgtagtctcactaagtatatcttactttttaattcccctggtagctaattgcttgctttagttacaaagatttcattgtttattcgttgtatagtgctttctgtattttttttttttatggttttagagctttattgtagaaaggcagggagaaaggagagaacgtagaaagagagagggagaggccggccatggccacatggagagaagggggaagggaaagagagaaagagagctagagagtaaggaatgtgagagcttaagagtgtgcgctttctgtaccttaaaaagtccctttctagctgacacaggatattttcctaaagtattttctggagtgtttagctctgccttttacatttagatgtacaatctgcctggaattcatcttggtatgtgatatgaagcacacagattatattttggttttgtctagtgtgtttatcgatatattagagttctatttattgaaaaggtagtcttgtgccctcatgatttacatgttgtgttttgtgcctgtggttttaagggttcaacccaacagcctgcacatgtgaggcgagcaagcacacacctgggaacctcccctgcatctcagcaccttttccatggcttacaagtgttctgtttttctatgtgtttcattgtgcgcatactaaactgtcttgattattatagcctgaattgtagaccatgtcacatagaatgttactctttttccaaaagagtatctttactattttggccttttgcatttccaaatacattgtagagtttgatttagattgtctttctaaagtatatgttatttgggaattaatggccttataataccatttcacccatccttgtgaactccatacaacttcatgtatttaagttatctttaacgttcattaggcttttttttttctttgagattatgggaatcaaaacttgggccaagtaccactaggcaaagcactacattgctgagttgcatccctggcctttggctttcttgaaacaggatctttcagcatatctcaggatgctctggacctggtctatttcagggatgcctagaatctagggcctagaactcctgaccatcctgcctgtgcctctgcagtgcagtggatatggagtataccccatgctcggctatgtttaggttctgaggaaaggattcaaatacccttcattagaatcagtccttagttggtatggatgctatcataaatataatatttattttcatatttcatttctgaactcctcacatgatttttaaaaagcttacagattttttactaagtcatacagctttaaaaactagcattagaatggtgggatttctcttcttctatcctttacttttaacctgtttgtgtcttactagccgagggtggtttcctttagaagcacacagctgggttctggctctcagccactctggtgttagttttataatgtagtatctatgccattgttaattaatgggactattcataccattggttttcactcaacgtggtcatcttgatttttgagttctttttatggtcctattgtttgttctctgtgtcactgcttgaattattttgggggtttctttgctctctttcctgggtctgaaatcgtatttctcactggcactcacttatcactcagttcaggaacctagatgagttttgtcattttctgtctcagatctaatcagttatgaacttccatcctcctgactcttgaatatctcaacactacaaacttacttttcagtatttatcactgggttgtcttcacggtctgacctacctatgcatctgcaattagttctttataaacagtgtttccccgcccccgttattctgatgctacactcaatctgctaagtttccagtgcatgtccagtgcctcagctacatgggttggataaacagatgtcttagcatttaccctcttcccgtgtcccacactttcctgtctctcccatgtccagctgctcttgtcgtagctctttactgtctggtgatccagtcaggctgcccaaagatacggtgtgatgtgatagcttcagattctctcctggaaatcctccttcatgccttaactcctgctctaagaagcctattttttttaactggattagaaagctttgcctttataactctgctttcctcctgttcatctcacagagactcatgtgccactctgttccttacaagagtatagactattgctgaggtttgaggtacctttgtgtagattcctaaaaagtacttgtttaatggtagattgcacagagagtcagcttacagatgggctgtccatttgacttatcatggtaggcactaaacttttaactttcctattcaaagtatgtatatattgcacgccaaacatatttcacttacaaagaggaattctgataagtttgagatttaccattatgagactactaagtgacaatcaactttctgcaaagttcacacttttaacggtaagacttggtataatatgcatagttttaaaagaaaataagaatggtaggcagtcactattttgggacccaatggctctgtattggcgttcacctaatagtcagaacagcagagtggagtgagctagtgcacgcactcctgaagcctggatctccctgtgggcgagagagaaaaacttgagttactatttagaatttaaattttttatgaaaacaagacatggcaaaaatgtgctttcctgccttgttctgcaggagaggctgaaactcacatacgaggcgaagactgaccttctggaatctcagctgatgcttctgaggtaaatgaatcatctatttccagacacatcaaaagggtggggatcttaaggtagactttagcagttgatgaacaatagatgtgatcaaaattagaattacttgatagcacttcacaatgtagtacaaaaaaaaaaaaggcaatcagtcctgtgcttcaaggttatggtaagagttaataaggtacatatgttaggtgtctcctgtgctcaacactatgcatggtggtgacgatactctctgtacttgtactgtttcctggacttagcctacaattttttcactttcttttaggaaagacttagctgaataccagaaaacctgtgaggatcttaaggaaagattgaagcataaagagtctcttctggctgcgagtgcatccagccgtgtgggtggcctctgtttgaaatgtgctcagcatgaagctgttctttcccagacacacagcaacgtgcacatccagaccatcgagaggctgactaagtaagtgtgccttgtgtccggatctttggccacggaggacattgtatctataagggcatgtgtcctttgatctgatggggagtcacatacagttaacttcaactcccaataaaccagagtttagatggtcccttctctgtagctttcatgaagaaagagtggcgaaggtcgggtccgccagccatggggaaacgtcttagttcaaatctcatttgaggtaagaggattgaaataggtaatcctcatgggtcacgcagttcagtgactgcagtctcaacagccttcttcacaagatgggtgtgactgcacctctttagattgcgtcgtgtcttggatttacagtgtggtttaggcagaatgggctatcagcacatcttcttcacgtgcctgttgcagagcatattctgatgtcacaggaagaggatgcagctgtcacagcatcagcagaggaaggctgactagggggtgattacaaagaagctatgttcaaattcttgcccaggctgaaataccacaggcccccatgtgcatttcgtgatctagtttcactctcctgaaggaagtcttttctcttctgtaaaatttcattcagtagaaattgaaaattattggttattataaaatccagtgctgttttgcagtctgtgctttcctatgctcattagtcttgacccatctctgtctgctgtgctcatctcagaagctcaaactgcatttatttccaagttattccctcactaagtcccacccagtaggtcctcaactgacttcatgctttcctctgaatctttagaatacatcatgtccacttgagagccacactgaggtcttgtttattgcttcagctctgggtcctgccagagtccctggccttgttgttcactcagtgttcatgttctctgcctatgatgagataggggttggttgcttaccagtcagagatcccataggcagaattgatatacaaacatggaatgactgatcattaaaggcaggcagatattctttacaacaacttgctttattgctctgaatggagttttctattctgctattttctgggaaaatatacaaaggcatctttaccttatgaacaggagcactgagctttgacacagactgccttggatgcatagtctagttcttccactgtttgctgtgtaatttcactggggttgtctagcctttctgggtctctgtcttctcacttttagagcatatgaggtgtttgggacagtagttgagatgatatctatacagtgcttctttgtaaatgctcagcattgttctgctgagcagtatctacatactaaacaccagagcctctgcacttcacagagcataagaaggtttgatgtttctgccaacggtgacttccacacacgattaatgtactgactgctgtacaaaacccaacttgccagtagggatgactggtagctgatggccttgattttgctaagtatgttgtgagttattattaaagcttttacatatattcaataaaacacacacatgcacgcacacacacatgcacacacacacacacacacacatataatatttttcctacccaaataatagtgagtgttatttgaccaggcctgagctaggtaattgaaaaacatagtctcctttaatcttaaaatgcattgtgtaaggcaggcactgttatgtgcatttataagttgggaagcagtggctcagagaaattaaatttttctttctatttgataaaaataaaatagaactgtactttgcaaactgaattatgtataaagagccaaatgtagttcagactataaaagtattagaagtaaactgatagctttggacttgtatcctcagcatgacatgcaaaagtgaaagtcataaacagcaaaagattattcccttgagtcattaaaaaatgacctcatgggcatcgggggtggtaacccacacctatggtgaccgagctctgtaggctaaggcagaggatccaagccagtctgaatatagagcaggatcctgtctcacagagcgtaaggttccttgtgtagctcagcggtgtgacactgatccacatgtccagggtctaattcgcagcactacaggacaattttaattaattgacttaatttacttaaagtaaaatattgcaaattatagtaaaagactgggaacatgcttgccacgggtaactaactactagagtatgtaagcagttttgaaataaaacatggcagactgtccagttgcactgtgagtaaggggaagaggctggtaagagaggaagctgtcagttatcagaagatatttacacgactaagagcagcctactccatcggactggccatgactaatggtggatgattccactgagaccaggatttccgtgccttgccggtggcacaatgaaatcagcacagctactttgcagggtgatgtagcactctctattaatatttaatttatgtgttatagtttcctacaaagaaaaggtcatgtacacacattagaacatcatagagaatgcttttgtagcattatttgtaagggtgtaaaagcctgaccatccttcaaaagaaagaactaaactgtggtatgtttcagctatgccgatttatggaagaatcggggctggagagatagctcagccagcacgctgcttgctgcaaaacatgatgctctaagttcagtccctgggagcccatgagtgcctacaaagctgtcctctggcctctacagtggtactgtggcacatacatgtgtaacacacacacacagtaaataaacgtgaaaacttaaaaattgtatgcacagccacacacagagttcacacagattttgtatatccacatacacatatgtgaagacccatgtggtctagtgtgagcctaactccaaagtaaataaatgacctaggataacagcaaagcaaaaccatttgattttctactatatatcatagtagatactttctctagggtcatatatgtatagagaaaaagatttgaaagaatgcacatcagatatttaacagtagttaacactgaaaaggtagaaaggggccacaaggattcaagatttgtttcagtctttaatcccattggtctttaatctaattttacatggagattatgaaaaaatattacgatgatgttttataataagtagatgtcaaaggcagttttaactagtcagtctagtggaatcaaccaacaaataaaatcagcgtgcacctctatagcattggccttctaggctgtagagaacatgtcgaatgagagtcacattgatttatattgactgagtgtctgagggagattacagtgtttatattgatcggatgtctggcttttgtttagaaagtagattcttgtcatttatgaattctacttttgttatcttaaatttgatctcagcctttgagaggaagtgctggcctacttagtgcacatttctgctgtgtcagcaatgtggccttatgttccacttcagtcacagaatagggcgaaaggtttctgcttttcttatttttatggattgtaagactccctttgtgtaatctgatatttagacctttccaacttattagtgcacaatgctgcctactgagcatgccgctgactttgaaaagcatccagcatgccttgggtttggatttctagttttgtgtacttaatgtcagtcagtgcgtgctacatgattttaatgtaggatttgggaactgaaccttaaatgtgataaatccaaagagcttgctggagccttgagaaacatgaacttgtgaaaccagtcgccagctactccttccgcactccagcaagatctcttctggatatgtgaaccgtaagtgacatgtggtagacagggagggcgtgaggcataccacggggaccagaccacccatgtttctgtggtgctccacactggggatcgtagtaagtcacttaagatgtgttaatattgcttgtgtttttaaagttggtttgaaatcttctgaagtgtcttccactcaggctgctttgtcccataaagtaggtaaaagcaacgccaatttcttttattctctttcataatgatcaaattttaatagttttcaggtggtagttgaaaattctttagagaaatcctggatactttttttttttttgaggagaaatgattccagtagtgctgtcctgggttttggtccattttgtgatcattggcaggcttctgtccagctggcattaaacagctgcagcagggagctttccaaaaatgaggcacaaagaaatgtttcatcagccttctagactttccttaaagacaggagtaatgatgcttgttaaaacgctgtttactgcaaatgcataaaattgacagtgacttaaagcattattgcctagtagttctgtatttccagatgaggttgattcatatttcttttatttatttatttattatatgatttttttcttttctttttttaaatttaattttacttgtaattcattttttacactccatattccattctcctcccctctccatccaccctccagctgttccacattccacacttcctccccaccccaccccatctccacatggatgcccctaccccccaccccacgtgacctctaaacttcctggggcctctgttctcttgagggctaagtgcttcatctctgaatgaacacagatctggaagtcctctactgtgtgtgtgttaggggcctcatatcagctggtgtatgctgtttgatggtccagtgtttgaaagatcttgggggtccagattaaccaagacttttggtcgtcctacagaatcgcccttctcctcagcttctttcagccttcttcaactcaaccacagagatcagcagcctctgtctattggttgggtgcaaataactgcatctgactctttcagctgcttgttggatccctcggagggcagtcatgatagatccctttttgtgattcatgtttcttaaagcaaccttctcctatgtgtatttacacccacggctgacgttttcagggtcttcacctggcttcccttgctccgacagttcattaagtttctgatgtgctgcactcatagtgtgtgcaagggcttttccagtacagccccatccctaccctcacaggttgtgttctgtgtgttgtctttacccctgcctgctttctacctgggctgtggagtactgtgagttcagttcatggggctggctcaccttcaccaggaaacgccctggctgagaccctggggtgatcatgtgctgtttttaagtttttgtacaactttgcctcagaagatgatgtcgcatgtgtctgttccactgtgtccctttgtcctcaggcctaacactagttttgtcctctggacacagcctctgaaggaggacgcacctgcccacaatccacctggctacctgccatactattgtcacatttctgaatacccagtagtcttgacaaatgcaagaggaaagtgtagggtgcaaagtgggagatcagctaagaaagtgacaggcagatgaagatgggggtagaaggaaccaaggctccccactgacgagcccaggctgccaccaagagctctttgtttcctgagtatacagtgttgggtaaggagtggagttgaaacacagccaaaggcgagatgcagcgctaagtgtaggaccctgagcttgccaggatggctctccataacctcccatggccatgggaggcgctggagtggctcactcccacccgtgcagatgtttgtttgccatctcctaaaagacgattttaatgaaatgtctgtgtttggggctcatttgtaatgattttctttggcttaagggttgatgaatttatatcctaaagcatcttgaactagaagaattaacgtttactttgctcttctaaataatgacttgaccttttccatgtaaatcttacaacattattactgggaaatctcttttggtatcacttatgaagtcttcctgttatggatgtccttagtcatacacttgagctttttagtttattttaatatggaaaaatagtagactcataaacagattaaactattctaaagtagtttaatttgtggctttaattttacatgtattttttatgtgcatgtgtttgtgtgcacacatgcattccatggcagagagcctctctcgggagttgtttaactcctcccaccatgtaggtccttggcatgagactcagtttgtcatccccagcagcaagcgctttccccacagtgagtcatcttgcggccccgtacatatgttcttcttgtcatttattttgtctaggatctactatgtgacaaatactactcttgatagagggtgccctgaaaataaactaagtggcttaaagctatctccgtgagaagcagaggtggtcgctcttggcctcgcagggtcagttaacttgttttacattcactgggcagcttgccgttctctttggggctgggaacctcgtccttgtgatagagtagtatcagggcagagaaaggatgccaccgagctataacgtttttgctattcagtagctctcagggaggcgagcacatgattctcaaactgctttgtgctcctaagggtgattttcttccaggttcataggtccttgtcatttgtgtatcccggtttatgttatttacacttttgttttgaaactcaaataagtacaaattctgttttgcttgcattccttttttactttagaatgataaatctgcttttgagtctcttactctcccacataattatgcctcataatattcaatcagaacaatttactgttttttatttcacttaggataaaaattaagtaattttcatggatttaaaacaaatcaggaagctcatcaccattccatgaattttatgctatttgtaacaatttgtggtttaacaaaaagagcttttatgaatgtgttcagcattacatgtttctaaaactgtgtgtgactattttccaaataccacagatagtttaaaatcttttcttcgggagatttgtggagtcattagttagtttagaagggtatttggaatcagtgtttgcgatcttccaaaccactcttcagtgcttgcttgcagcttgcttgcttgcagcttgcttgcttgcagcttgcttgcttgcagcttgcttgcttgcagcttgcttgcttgcttttctttcctttttctttctttttatcccagttgcttcttctctgacagtttataatctggcagcgggttgacgctgcatgagagagctggtcatgttgatggcgcacaagatggcacatgtacagtccagcatgcttttcactctgctttgtagatgtagacaatttaccacctcatttctctcattggcaccgtgggtatgtacagttttaaactatatctttattttgcatatacatgtgctagcttgtctgcatgctgcatggggtcctgagagaccgaatgtagatctggtcgggaaccacttggtgtgggtgctgaacccaggtccttgtgaagagcaagttcttctccctgagctgtctctctagttccccctactacggattgttgtacagtgataagtttcgaaatatcctgagagtttgttatggaattcgtttaacccgggaaattggatcttagcaatttttcatgtcacaacattggtattctgcttactcaacaagcagcccagcctagtggacatctgaggcttattaagggaggggtggagcttgcccaggattcagaccagtagccaagattttgttcaattagagtgtcagctcctaaaagatacaactggagggcttgaggggtcccataaaaatacccactgaaataaaaagcagaaataaacagcagacttcataactagctgagagaatttgactgggggtgggggagatgaaaatgaggccacggaaggattaaaaggaagtgtgtccaccagtcctagcaagccagagtagacagcacgtcaaggcctttgaacccccacccctgcctgctaacgagtgagaccaaggtttctcttcaaatattctaagtctttcacatagacttcctcattggtaaagctgcctttgatgtgcgcacactcttctgaacttggttgcctgtcccagctccttcacttcccttttctaagtcattccctcttgctgaggcctctctctgtggtcctgcatatgccagccatttccaaaaaagggtattgtcccatgcagatgtggtcctgcctggaatgccgcagtccttctgccactctgcctgccacttgccgaaggaggacagaaggtcgttctctgggtggtgcttgatgcgtgctgagcaggcccgccatagcacttctaatacacacgagtgcttccctttcttcatttcttacctggtgtgttctttttgtgctgacagagagagagatgacttaatgtctgtgctagtctctgtgcggagcagcttggcagaagcgcagaagagagagacaagtgcctatgagcaggtgaagcatgctgtgcagatgacagaggaagccaactttgagaagaccaaggcaagtctgatgggtggaaagggatatagcacacagccactttccacatgtgtatttctctgattattttttacaactgaactaattgcaaacacacaaaacagatgtcagtccacaaatgttgacttctctaaattaaaatatatatatattatttggagagttcttattcttctgtaaatatttctgttctgccactactcagaagtgtaaaataatgtgggaaagtgctttgggagacctgctggtgtgcataatcttgtttacagataggtagtcactacaggcagcctctgatggtttagtctagcttcacttctggcctgagcatctctcaagacctaaggagcatccatggcagtcctctactgccaggagtggaaggagctcagctccacctcccttatcaggagggactggaaactgagccaaagcctgcccttccccactgtgatctacccatcagatgcagccatagctgtgggagagcatctcacccaatacctttgactctgcatcttccctctctctggttacttctttctttatcatttccttctccacagccctcttttcttgctgagaggcaagctccttttccagtctttctgtctgcctctccagctcactcttcagctgctcacactggatcaaagcctgcaggcaagagagcgagaagggacgtcaggagtgggaaggcacaccagggagaaaagaggcaatgatacccttttttatttaagatagctcaacccccatctaccgatattgaatactgtattttattatacacagacacatttttaataaagtcccttagtatcacttacaatttagtccactcccattgactagaaaacaactttctgttatcaggatggacattttacaatgccaataaaagttcataattgaaaaaaccaaaaattttccttgaaccaaaattgcctattatgtgttttcacaaataaaaactctctcgctaccatcatcgatagcatccaaacataaactaggatttcaaagttatagtttaaaagcctcagtgaagctagggagcctgggtatcttggtcttgttccagttatttgtgcctgcagcatctgcctcacccaactttaatttccctatctttttggtggtgtctttccgggtaacattcttgtcacccttggtcaagtgcagtcgggctttcagcaagttccagattgtgttcgtattgaactgttcacttcctcagtaccaatccagggcccaccctccttttgtcctcatcccattcaccctcatgcagtagctttggaagtgtcagctgtcctgtctttacggcagtctttttcttctcctgcttggctggcacggtcctcctgtgggtcttctctgtgtggctctgtgaggaactcttgggtctggtttactaaacccaagtgtggcttcccagtcctgcccgccacagtgtccgatctcttgagattcattcctccttcatccatttcctccttcatccatggccactgaacacgacatgtggctttttcctgtcactgctctagcttgagctacatctgctgtgagcatcttctacacagccccactttctatctactgcatctttgccgttggtttgctcactaatactactttgccagcaactcagacgtatagcatttacaatatcttcagcccctgcccacacctcaccatgactccagtcccctatgtgcccaccgttcccctcccacactctgctgagcgtttacaccacgtgtgcagactattgctgtagcgtcctgactgccctcctgggttccccctgttccagtgtgtcctttccactatcttaggttttctgggttgtaactatctccctagggaatccctctcctgaagtataggaagagatacgtttccatgcattatcttccaccacactctttcgtgcagatccagcatgtgaattctaacagcattagcctgagctctctgagcccgtgcaggctgctctgtgcatgcatagatggcacacttgatcctcataggaggcacagttcaggtggcactctttgtagacatccctgtgtcctgtttttttaatattttttattaggtattttcctcatttacatttccaatgctatcccaaaagtcccccatacccttcccccccactcccctacccaccaactcccacattttggccctggcattcccctgtactggggcatataaagtttgtgtgtccaatgggcctctctttccagtgatggccgactaggccatcttttgatacatttgcagctagagtcaagagctccggggtactggttagttcatattgttgttcccactatagggctgcagatccctttagctccttgggtactttctctagctcctccattgggggccctgtgatccatccaatagctgactgtgagcatccacttatgtgtttgctaggccccagcgtagtctcacaagagacagctatatcagggtcctttcagcaaaatcttctagtgtatgaaatggtgtcagcgtttggatgctgattatgggatggatccctggatatggcaatcacaagatggtccatcctttcgtcacagctccagactttgtctctgtaactccttccatgggtgttttgttcccaattctaagaaggggcaaagtgtccacactttggtcttcgttcttcttgagtttcatgcgtttaccaaattgtatcttatatcttgggtatcctaagtttctgggctaatatccacttatcagtgagtacatattgtgtgagttcctttgtgattgggttacctcactcaggatgatgccctccaggtccatccatttgcctaggaatttcataaattcattctttttaatagctgagtagtactccattgtgtaaatgtaccacattttctgtatccattcctctgtggaggggcatctgggttctttccagcttctggctattataaataaggctgctatgaacatagtggagcatgtgtccttcttaccggttgggacatcttctggatatatgcccaggagaggtgttgctggatcctccggtagtactatgtccaattttctgaggaaccgccagactgatttccagagtggttgtacaagcttgcaatcccaccaacaatggaggagtgttcctctttctccacatcctcgccagcatctgctgtcacctgaatttttgatcttagccattctgactggtgtgaggtggaatctcagggttgttttgatttgcatttccctgatgattaaggatgttgaacattttttcaggtgcttctctgccattcagtattcctcaggtgagaattgtttgttcagtttctgggccccattttttaatggggttatttgattttctggagtccacctcttgagttcttttatatattggatattagtcccnnnnnnnnnnnnnnnnnnnnnnnnnnnnnnnnnnnnnnnnnnnnnnnnnnnnnnnnnnnnnnnnnnnnnnnnnnnnnnnnnnnnnnnnnnnnnnnnnnnnnnnnnnnnnnnnnnnnnnnnnnnnnnnnnnnnnnnnnnnnnnnnnnnnnnnnnnnnnnnnnnnnnnnnnnnnnnnnnnnnnnnnnnnnnnnnnnnnnnnnnnnnnnnnnnnnnnnnnnnnnnnnnnnnnnnnnnnnnnnnnnnnnnnnnnnnnnnnnnnnnnnnnnnnnnnnnnnnnnnnnnnnnnnnnnnnnnnnnnnnnnnnnnnnnnnnnnnnnnnnnnnnnnnnnnnnnnnnnnnnnnnnnnnnnnnnnnnnnnnnnnnnnnnnnnnnnnnnnnnnnnnnnnnnnnnnnnnnnnnnnnnnnnnnnnnnnnnnnnnnnnnnnnnnnnnnnnnnnnnnnnnnnnnnnnnnnnnnnnnnnnnnnnnnnnnnnnnnnnnnnnnnnnnnnnnnnnnnnnnnnnnnnnnnnnnnnnnnnnnnnnnnnnnnnnnnnnnnnnnnnnnnnnnnnnnnnnnnnnnnnnnnnnnnnnnnnnnnnnnnnnnnnnnnnnnnnnnnnnnnnnnnnnnnnnnnnnnnnnnnnnnnnnnnnnnnnnnnnnnnnnnnnnnnnnnnnnnnnnnnnnnnnnnnnnnnnnnnnnnnnnnnnnnnnnnnnnnnnnnnnnnnnnnnnnnnnnnnnnnnnnnnnnnnnnnnnnnnnnnnnnnnnnnnnnnnnnnnnnnnnnnnnnnnnnnnnnnnnnnnnnnnnnnnnnnnnnnnnnnnnnnnnnnnnnnnnnnnnnnnnnnnnnnnnnnnnnnnnnnnnnnnnnnnnnnnnnnnnnnnnnnnnnnnnnnnnnnnnnnnnnnnnnnnnnnnnnnnnnnnnnnnnnnnnnnnnnnnnnnnnnnnnnnnnnnnnnnnnnnnnnnnnnnnnnnnnnnnnnnnnnnnnnnnnnnnnnnnnnnnnnnnnnnnnnnnnnnnnnnnnnnnnnnnnnnnnnnnnnnnnnnnnnnnnnnnnnnnnnnnnnnnnnnnnnnnnnnnnnnnnnnnnnnnnnnnnnnnnnnnnnnnnnnnnnnnnnnnnnnnnnnnnnnnnnnnnnnnnnnnnnnnnnnnnnnnnnnnnnnnnnnnnnnnnnnnnnnnnnnnnnnnnnnnnnnnnnnnnnnnnnnnnnnnnnnnnnnnnnnnnnnnnnnnnnnnnnnnnnnnnnnnnnnnnnnnnnnnnnnnnnnnnnnnnnnnnnnnnnnnnnnnnnnnnnnnnnnnnnnnnnnnnnnnnnnnnnnnnnnnnnnnnnnnnnnnnnnnnnnnnnnnnnnnnnnnnnnnnnnnnnnnnnnnnnnnnnnnnnnnnnnnnnnnnnnnnnnnnnnnnnnnnnnnnnnnnnnnnnnnnnnnnnnnnnnnnnnnnnnnnnnnnnnnnnnnnnnnnnnnnnnnnnnnnnnnnnnnnnnnnnnnnnnnnnnnnnnnnnnnnnnnnnnnnnnnnnnnnnnnnnnnnnnnnnnnnnnnnnnnnnnnnnnnnnnnnnnnnnnnnnnnnnnnnnnnnnnnnnnnnnnnnnnnnnnnnnnnnnnnnnnnnnnnnnnnnnnnnnnnnnnnnnnnnnnnnnnnnnnnnnnnnnnnnnnnnnnnnnnnnnnnnnnnnnnnnnnnnnnnnnnnnnnnnnnnnnnnnnnnnnnnnnnnnnnnnnnnnnnnnnnnnnnnnnnnnnnnnnnnnnnnnnnnnnnnnnnnnnnnnnnnnnnnnnnnnnnnnnnnnnnnnnnnnnnnnnnnnnnnnnnnnnnnnnnnnnnnnnnnnnnnnnnnnnnnnnnnnnnnnnnnnnnnnnnnnnnnnnnnnnnnnnnnnnnnnnnnnnnnnnnnnnnnnnnnnnnnnnnnnnnnnnnnnnnnnnnnnnnnnnnnnnnnnnnnnnnnnnnnnnnnnnnnnnnnnnnnnnnnnnnnnnnnnnnnnnnnnnnnnnnnnnnnnnnnnnnnnnnnnnnnnnnnnnnnnnnnnnnnnnnnnnnnnnnnnnnnnnnnnnnnnnnnnnnnnnnnnnnnnnnnnnnnnnnnnnnnnnnnnnnnnnnnnnnnnnnnnnnnnnnnnnnnnnnnnnnnnnnnnnnnnnnnnnnnnnnnnnnnnnnnnnnnnnnnnnnnnnnnnnnnnnnnnnnnnnnnnnnnnnnnnnnnnnnnnnnnnnnnnnnnnnnnnnnnnnnnnnnnnnnnnnnnnnnnnnnnnnnnnnnnnnnnnnnnnnnnnnnnnnnnnnnnnnnnnnnnnnnnnnnnnnnnnnnnnnnnnnnnnnnnnnnnnnnnnnnnnnnnnnnnnnnnnnnnnnnnnnnnnnnnnnnnnnnnnnnnnnnnnnnnnnnnnnnnnnnnnnnnnnnnnnnnnnnnnnnnnnnnnnnnnnnnnnnnnnnnnnnnnnnnnnnnnnnnnnnnnnnnnnnnnnnnnnnnnnnnnnnnnnnnnnnnnnnnnnnnnnnnnnnnnnnnnnnnnnnnnnnnnnnnnnnnnnnnnnnnnnnnnnnnnnnnnnnnnnnnnnnnnnnnnnnnnnnnnnnnnnnnnnnnnnnnnnnnnnnnnnnnnnnnnnnnnnnnnnnnnnnnnnnnnnnnnnnnnnnnnnnnnnnnnnnnnnnnnnnnnnnnnnnnnnnnnnnnnnnnnnnnnnnnnnnnnnnnnnnnnnnnnnnnnnnnnnnnnnnnnnnnnnnnnnnnnnnnnnnnnnnnnnnnnnnnnnnnnnnnnnnnnnnnnnnnnnnnnnnnnnnnnnnnnnnnnnnnnnnnnnnnnnnnnnnnnnnnnnnnnnnnnnnnnnnnnnnnnnnnnnnnnnnnnnnnnnnnnnnnnnnnnnnnnnnnnnnnnnnnnnnnnnnnnnnnnnnnnnnnnnnnnnnnnnnnnnnnnnnnnnnnnnnnnnnnnnnnnnnnnnnnnnnnnnnnnnnnnnnnnnnnnnnnnnnnnnnnnnnnnnnnnnnnnnnnnnnnnnnnnnnnnnnnnnnnnnnnnnnnnnnnnnnnnnnnnnnnnnnnnnnnnnnnnnnnnnnnnnnnnnnnnnnnnnnnnnnnnnnnnnnnnnnnnnnnnnnnnnnnnnnnnnnnnnnnnnnnnnnnnnnnnnnnnnnnnnnnnnnnnnnnnnnnnnnnnnnnnnnnnnnnnnnnnnnnnnnnnnnnnnnnnnnnnnnnnnnnnnnnnnnnnnnnnnnnnnnnnnnnnnnnnnnnnnnnnnnnnnnnnnnnnnnnnnnnnnnnnnnnnnnnnnnnnnnnnnnnnnnnnnnnnnnnnnnnnnnnnnnnnnnnnnnnnnnnnnnnnnnnnnnnnnnnnnnnnnnnnnnnnnnnnnnnnnnnnnnnnnnnnnnnnnnnnnnnnnnnnnnnnnnnnnnnnnnnnnnnnnnnnnnnnnnnnnnnnnnnnnnnnnnnnnnnnnnnnnnnnnnnnnnnnnnnnnnnnnnnnnnnnnnnnnnnnnnnnnnnnnnnnnnnnnnnnnnnnnnnnnnnnnnnnnnnnnnnnnnnnnnnnnnnnnnnnnnnnnnnnnnnnnnnnnnnnnnnnnnnnnnnnnnnnnnnnnnnnnnnnnnnnnnnnnnnnnnnnnnnnnnnnnnnnnnnnnnnnnnnnnnnnnnnnnnnnnnnnnnnnnnnnnnnnnnnnnnnnnnnnnnnnnnnnnnnnnnnnnnnnnnnnnnnnnnnnnnnnnnnnnnnnnnnnnnnnnnnnnnnnnnnnnnnnnnnnnnnnnnnnnnnnnnnnnnnnnnnnnnnnnnnnnnnnnnnnnnnnnnnnnnnnnnnnnnnnnnnnnnnnnnnnnnnnnnnnnnnnnnnnnnnnnnnnnnncttttagtattctatctttatttagtgcatttgttgttttgattattatgtgtcaggcaggaatttcttttctggtctagtctatttggagttctgtatgcttcttgtatgttcatgggcatctctttctttagatttgggaagttttcttctatgattttgtcgaagatatttgctggtcctttgagttgaaaatcttcattctcatccactcctattatccgtaggtttggtcttctcattgtgtcctggatttcctggatgttttgcgttaggatctttttgcattttccattttctttgattgttgtgccgatgttctctatggaatcttctgcacctgagatactctcttccatctcttgtattctgttgctgatgctcacatgtatggttccagatttctttcctagggtttctatctccagcgttgcctcactttgggttttctttattgtgtctacttccctttttaggtctagtatggttttgttcatttccatcacctgtttggttgtgttttcctgtttttctttaaggacttgtaactctttagcagtgttctcctgtatttctttaagtgagttattaaagtccttcttgatgtcctctaccattgggcctagctttttggatgtgttggggtgccctggactgggagaagtgggagtgctgggttctgatgatgttgagtggtcttggtttctgttagtaagattcttatgtttacctttcgctatctggtaatccctggagttagttgttatagttgtctctgtttagagattgttcctctgttgattctgttaccctctatcatcagacctgggagactagttctctcctctgagtttcagtggtcagagcagtctctgcaggcaagctcacctcttacagggaaggtgcacagttatctggcgtttggacctcctcctggtcaaagatgaagggccaaaacagaacctttcccagaagctgtgttgctttggcctgtcccagaagctgttaatttcagtagtccacattctcacctgtgcagactactttctgtggagttccggaaccaagatcgcttccgcagatcctgaggcaaaaacctccagggccaggagggcccctgtcctctcgcctggaaggtggccggatgtctggagcccgaaaacggcgctgcctcagaagctctgtggctctcgcctgtcacagaggctgttagcttctgtggtccacactcttgtctgtgcagacaactttctgcggagtcccgggagagaagaatttttaaaaaaggaaaaagaatgtatgaggtggacattgtgtgctatgtacctggcattcacactgtattgaaatgtgataacatggtgttggagtctgtgagttttcacctaatgttctgataaaacatacgaattttgctttgggagagtattaaaagatagggactgtggatattttcagttcagaagcactttttaatccgaagtagttgcttggtgtttgttgccacccagtggtcattgtttgtattgcattcagagtagaaggcattgctttatggcactgttgtttacccttctagtggctgtgaaagttcctgacctgtttataagaaacaaataccagagctccctgggactaaaccaccaacaaagagtacacatggtgggactcgtggctccagctgcacatgtagcagaggagaggcccttggtcctgtgaaggctctatgccccagtataggggaatgccaggaccaggaattggagtgggtgggttggtgagcagggggagaggggagggtataggggattttcggaggggaaaccagggaaggggataacatttgaaatataaagaaaatatctaattaaaaaagaaagaaatgaaaaaaaaaaaaaaaacaacaaatatcaggcctgggcagttcataatgttgttttcaggtaatggtgtggaagtactgtccagcaatggttgtgttccactttctagatctgtggtttgggcaaattatttcctgattgaaagctgtaccttttcctacctgggtgaggagaacactgaaatcgccctggtgaacgtggtgacaggactctgtgctagccacttaggaagcttttagtgcataaggtcactcagtgaagggcttcacttgaaaaatgtaacaactacaactgaagatgatttttaaggagaaaaaaaatataatctgggaatcaatgagggtagaatgtgttgataaaattcaagaatcaggtagcaaaggttccaggctgcctgcctgcctgcctcaggatcaaagaggctgagtgatgtgtgcaggcatgggcttaggaagtcagtaggcacaagagaggtgaaagaacactctgaggaaaattttctttacaaatggcaacatagaaggttcagtaaatgttaaaaaaaaaaaacatttttattctgtgtcttagattttaagaggagcaaaaaagcagaaataagaaatttggggtggaaaaaagaccagaaaagcattgagcaccagacttcacttgggcatggccgtcatgccgcttgcagcacagtgtctagtgcaaaacagaaccaagctgtcagtgcaccttactccctcacccagctgggctgcagtcctcacaggcatgtttgtggtgatgctgggattagcaagcctggtgctgcttcagaatgtggcatatgtggttatgtagtatatacaaccgtcagtgataaaagcaactgtgtcattggccttcatgtgtgttgtattgtttaccattattttagactgtatcccttgcgtgtgtgtgatcacaccagcagtagcctcattcacctcatattcagagggtctcctgattgcttcagaagcagtaacatgacctacaatatgcaggcttatgtaagtgtcaactgatatagtatgcttttctcagaacatggccattaactgatgcaaatagtctcagtgtaggcttatggataagtttccggtaagcaagtatttatacattaaaagcaatactgtgttttattcataagtaaaaatcttaaatgtattgataatcacttttatttaatgggctttgcttcaaaaaaataaattcatatttataagctttaaattttatgctcactaaacgtaaacaataaatcattgtggtatattaatttattattcatgagtcttttgctggaatttctaggaaactataacagttgggaggaagattagaaatgtcataaaataggtttcctggtttaaaacttcagttggaagatgttagttttgttgtggaaaatgtttgacttctttatgatagtaatttttatcctttggcttaataaaactagaaatagaaatacgaagcccacaaagttatgttttgaaataactgttgataaacagcatgcagtgactgcaaaggaagccacatgagtggaatccattggtttgggaaagcaaaatttctcagctcctcaaggctggcggccatttccaccaagtaaggaaaaggagaacccaccacagatcccccgggaaaaatggggtgcaggccccacttggacatgatcatcttagttgtgatgtagcctctgaggattttgtttcttcagggttatacatcagctgtggctctcaaaaatgagtaaattcgagcccttgaactacaaggaccagtaccctgcagacccctgtagtgagggttagagagtcctgagccttggtgaggccacctgttagagacgttttagattggggatgccagctccctgatttaggtccaagggtaaggcgattgcttgttgctcaatcattaagacctgaggtaggatctgctggggaggtggagacaggaggatctctaggacataataccaaccagtctatgtaactggtgagctccaggtcaggtgggagaccatctctcaaaaattaaggtagagatgtggttgaagtggactttggcttccatgtgtgtgcatatgtgactaaattttttattttcacacgttactaaattttactgtttctttcattgtaaccaagtataaatgttaaaaatttaaaagggtataaaatgaaatgtgtgaacttggttacatacctagtgacagactccatgacaatttgtaacctaagggttagtcattgctcttcattcctcctccacagccgcctgctgatgagcatcaggagacagaagcctcaggctcagcagtcagtcatcagcactctgtttatatgactgacagctccactttgtgctttccactgaacctcctcttgctaggccaccatgaggaccatttcctctggttcccgcggaaactggaatctttccctcttgctgtttgggctggctgggctctcaggtgttcttactgttcccatacttaaatggtgttaatgcctaagtttttgttcagttgggaatttctttggatatactggttctatttacttataccggtagtattcattatatcagtaaaggttactgggttgtgttttactagattagtggaaaatggttataactaacacaattgcacagaattcagtattccctagtatttcaggctccaacagattcagttatagaaaaaaaaatcactctcatttctcttacaatctagtttaaaattttcctagtttctaaggcactcagctaggatttaagttggggctaacttccttggagaactggttttaatcaaaaccaaatacaatttggttttgattaaccagacacgtttgaaattggctctcatactgtaggataacagaaactttccaaaataaagacctgaaagtgaataccttctagatgaaggaaggagagtttgctgcatatcctagatattttctgtctatatttagcttttagcagagggcagcataactgtgcctaaaacccaatggtgtacacggagactatttccatatctactgtcaacaaatgtggctgtgcagtttgtttgctttatttttattttcaaatagttttaattttttctctcatattttacatcctagccacattttcccctgtttcttctccccccaagtctcccccctccaacttctcccccttaaccactcctcttctgattcccttcaggaaaggacaggcctcttaggggtaacaccaaacatgtcatatcaagttgcaataagactaggcacctctctcatattaaggctggatgaggcaacccagtggtgggaagagggtcccgaaaacaggcaaaagtgtcagagacagcctctgctcccgctgttaggagacccacaagaaggccaagctacacaactgtaacatatgtgaggagggcctaggtaaggtccatgcaggcttccctggttggtgctgtgggttgcttgtgatgttcttgtcctgtctggctcctacaaccccttcttcccctctcctgcaggattccccaagctccacctaacatttggctgtgggtttctgcatctgcttccgtctgttgttggcctctctgatgacagttatgctctggtcttggagtacagcagaatattattaggttgtatttggttctgtcctaggtgtctgggctgtctggcctctggttcctggtcctccagacagtgtcgaggtgagatccctctcatggcatgggtctcaaactggactggacattggttggccacttccccatggcacatcttgtaggtaggaggttttgtggctgactgttccagttcctctcctggaagtcttgcttgactatgagagatggtcagttcaggctctgtatcccccattgctaggagtcttagggctaccctggtagattctttggagtttccatagactccccaattagcccccaattccagttgtctctcccaataatttctccctccatctccctcttacttgatccctcctgctcctgtctccccccacaataggagatttcattcctgctccctccctgaaacatccacttagaagtgaggacagaccatgtttgactttttgggtctgggtcatctcaccaagaatgattttttttctagttccatccatttgcctgtaaaatttatgatgttatttttttatcagctgaataatactccattgtataaatataacccatttgatgtatccattctttggttgagggacagctagattgtttccagtttctgactattacaaattaggctgctgtagatatagttgagcaagtttcctttatggtaggataaagcatcctttgggtatatgcccaggggtggtataactgagtcttgaggtagatccattctaagaaactgccatattgatttccaaagtagctgtacaagtttgcactcccccgccagcaatggagacgtgtttcccttgctccacatcattaccagtatgaactgtcacttgtggttgtcttaaccatcctagactgtccaaattataatcatatagcttgtgagctatgtgagacctgggttgggccagtgctgtaggcatagacaaatgccagaggactgagattctataggaagttcatttgattgagggtttttttttatgtagtttgcagttctaattcattcttggacattatagataatggcattattatgaatatgtccaagggaagtgagggaggtttttcttttttatttcctttggtttttacagtccattcattgccccatccccacccaccttcccacagttcctcatctcattcctcctccccctgtcttcaagatgatgtctcccaccccaggcctccccactccctggggcctcaagtctcttgagagttaggtgactcttcccccactaaggcaaggccaggcagtcctctgctgtatatgtgtctgtcagcggtcttggaccaccagctcgtgcatgctgcgtggttggtggctcagtgtgtgagagaccacagggatccaggctagttgcgactgctggtcttcctatgggttcaccctcctcctcagtttctttcagcctttccctaattcaaccacaggggtcccggactagtcttgtagctttaatggtgaaatggcaacctgtgagtgagtgagagtgagtgagtgagtgacagtgagtgagtgagtgagtgagtgagtgagtgaatgaatgagagtgagtgagagtgaatgagagtgagtgagtgagtgagtgagagtgagtgagtgagagtgagtgagagtgagtgagtgagtgagtgagtgagtgagtgagtgcagcatcagggtgctgctatgacaatagtgttggaaagcagtcatccaagtggactgtagaaggtgtttgaactatcttaaataagaaagggtatcattgcctcatttctccctggtgtgccttcccactcctgacgtcccttctcgctctcttgcctgcaggctttgatccagtgtgagcagctgaagagtgagctggagaggcagacagaaagactggaaaaggagcttgcctctcagcaagaaaagagggctgtggagaaggagatgataaagaaagaagtagccagagagagggaagatgcagagtcaaaggtattgggtgagatgctctcccacagctgtggctgcatctgatgggtagatcacagtggggaagggcaggcttctgctcacagttttagcccttcctatcaaggaaggtggcacaacgctcctggcagtggtggtgggcacacctgagggctcacgcctgctcatctcccctgctttctgaagtcctgtgcacccctttccatcttcctttcagcttcaacagatgaattggaatctctgggggtgtagttataggactggtgcagctctctcagaaagcatacagaaggcatgcagaccttggggaaggtggctcttaagcaaatacattcatagatgcatcaagtctgtccagcctagacagtcatgagagacttgtgtgagaaggattttgaagtaaggcctaggaagatgacaggatagttaggtgagcagtggagttcaggggaggagagtgtcatgtgcaggaaaagccacacccataggagctgcagctctgcgctttgtggggtttggatgccgcccacgtggtagagcagagggagtcgggtagactgcagagggtgaagtgtggagacgtagagagggactaagtcactaatgctcctaaaatctacatgaggattagaaatgtcagctcaatgtgacatgaagccacatgttgagtcttcacattggacggtgtggtaatgatagctatatttgagggaagtcacctcattaataaactggagtagaaccagaaacccagagtatgtgctggatgataaggttagaattagtgatggcatcccgtggaggggataacattttggtcctagaaggtcactgggagttagttttgtcacccagggagagggaagagcatcgtggtcatagcttttcaggatggtttcagggcacatttactctcctcaagttccctcaacctcagcagagaaactgagttgaagccaataggtggcaaccagttaaactattggcctgccttgttcttccattcagttcttggctctttctcctgttcctggcccttccccccaccctcaggcagctcctgctgttgtccttgcagaggctctgctgattttcagcttgccctcctcagcatcatcagcagcagcagcagtgtcgtatcctctcagtctctactgtgtaagaagtttgaaaaatctcacagacttcacctccttcccaggaaaattagtctgtgttttatttgatccttctgagttcttgaagcagtctcttccagagcctctcagagcaaaactaggttcctccttgtaggttcccatacctcatattatggcaaattcttattggactgttgatgtctgtctctaccttcctgtgaggcccttgagtacatgagctgtcatcctcgctgcttggcacactcctctcatttagcaggtgctcacagacatatttttgaatgaagtatgaatagcatactaggaagaaatagaaggcccatggcaccagaaaggcatggcgaaggcagaggttagagctggtcctgtctgcaagtgatcattacaagccttgtgggaaggtggtgtttagctaagatccaaagaataggtaggacttagaatctagcttccaaggaaggaagtggcctatgttccacccgaaaaaggcacgagggaggtgtagttttgaattgcctcttgtgtgtatgagaaaatagcaccagtgtcaaaaactgctgttgttcacacatagggaattttcatttgggaagcggcctgctgcacggaaaccgtttgacttggtggcttcacaatataaaaccattccgctgaggattcaaataggaaggcaaaacagaatgatggagtgtgcttggtcatctcctgagccaaggaggcagctgaaggagcccttttcacaagtgggtgggcttcagcagatttgctctgaggatgagcacgatgtgagaggcaggagtaactgactcctcatagctggatgctgttctcctcaaggaaaatggctccaggcagcatggtgtgagaggtgacccaggttgacctctctgggaccttatttagtcttcaagcataatgaatgctttaagcacttgacaggattagatgagatgatgttttgaaaaaaaaatgtcccaatgcctgtcttatggtaggcattgagcctgcgtgttaccatttttattttagggacggcaccgtggacctgctgggcagttttcttgtgcctacgtcagcacggacagagaagcttgaggatgaactcgagccgttccttacgtgtttccttgagtgaacttggccaagtagcttagctctcttaatctcatttcaggggaactgaaaattaagccaatacaagtaatccaattttcattaatccaaatctgatacaattctttctctaaagggacttaaatgttgcattgtgtgtgcttgcgtgtgcgtgtgtgtgtgttacccaagcaaagtacttagtttcccatttcaccgaagtctctgcataataccacttcagcagttgtgatggagatgccgcaaacacggtaccgtggccacagtcacgcatgtatacgtgctaagggctagcatgcaagcacctgtctgtccttcctttgtccttccttccttctctccgtctccgaggcacctcgcctgcagaggacctgcgtctttactcagccttccctcctggatcctttacagcttctcaagcagatctgaaattcacgcccaggacaaaaacttgccaatgcacaatactgaatgagggattcatgaaacaatgagaagggagcttcctcattatattttcaaatactataattcatgtgtatgaaagtgtgcgcacggctaagcggaaagcagggatcgtctgttgtagctgtggaaccacaaagaaaagttttgcttttcagaaccgctctcttgggcggggagatggtggagttggtgaagtgcttaccgcgcagatgttaggacctgagtttggatccacagcacccacgagataaagccagacctggctgtgtgtgcccacagtctcagtgctgggaggctggagacaaaaaaagattcctggggcttgggggctggccagtgtagctgaacctatgagctccaggtccagtgagagactctgccttaaaaaataaggtacatagtgatggaagatgacaccagggctgacctctggcctcagcttgaatatacacacatgtatttatacacccacatgcacatgcgtgtacacatacacatgcacacacacacactactatgctcaggaatacagtctaatgggaaaagtgaccaattaatcattacaattacgttgtaaagttagtgtaaaactaggcactcctggcttcctaacaatggaagactcaagagactagccactctccccaccatgtccctttgagtgggaggctctagacaacaggtcccctgcctacctgcccatatttgcatcagtcccccagccatgttacctgctgtgagtttgtctcctgccttcggtgtgctctctgagccactctggtgtgttagttcagtccatcatttatcatatgcttatttgatcaccccctacagtccacacattttcttagttgcttcccttgacaatagtccattgccagaatccctaatttgttctatctcttctaccccttcatgcaatggtcagtgtactggaaaccactgtgcagacatttccatcaagctctctcaacctcggcgtccttgtctctcccttgcccctgtcaaagtttaaaggacttacctgatgtcagtgccttagacatccagctgtgctgcagctgtctgtgttacttctggctctgcaacagatgtggatggagaaactcctgcagtgtaatgctgacttccagatggtgggtgtggggggaaaagaaggtgtgacaacaggagggaggcctcaggaagtgggtgacaggaggcagcagacaggtcgtgggcagaggagctaaatgatgggtggtagaaggagggaggccgaaggaaggaaggaagggagggacggagggagggattggtgtgtgtcttgtaatagaaacggacacagagtttacaattaacaaaacaactatctgcgtatttattctaaacacggagcactcttagtattcttaacagatttatctccatataaataagtactatattagttttgttagcttgctactaaaattggctactgctctttgggtccagatgacctataattacaggtttatgatacgaataatcatgaacttgagttcttaaattacagaaattaaatgaaactctatttgccctgtttattttcctggacctttaattattcgttcagattgtaatatgcacaaagatactttgtagtttgttattagcaaagctctgtgccaaggaagttttcagacaacctttaatgtttgagacataactgtaaatcacatacacagttctctgtgattttcaggaaaagtcacttagttgatcattctaacttagtatcttcagggcttcttattttcatgtgggtcaagtatgctatttatgtaattcaagtgcagacacctgatgactgtaaagctcttacttaactgtaagcttttgttcagtattgacaatgtaagagtttttattaccacatgttaattatatacaataatgggcctcatcagtgtgttttcatgcgtgtatataacatattttgatgacatttatccccattaatgtctctgattcccctgttttgtttggtttttttttttttttgatatatgaactagtgagtttattgggcttatttatagggcaccagtttagtgtttcatgtatagaagagtccacgtgccgcgggcagtgatagagctcaagcatctcgctctgtctccacagacacagtgcccagggccgcattccttcactttcagtgttaactaacaagttagcactgaaaagttggaagcactgaacacagctcaaccattaagcctaaggactggaaaatgtttctaattccaaggagaaataaggaggacttggtgctatctacagactccctcagaaaagccatttatcctaattattcatccatatactcttggaacatttggtgccttttaatgaacatgtccttgaggaacttctagtcaaaaaccaaagagacagctaaacacaatgaccgggtgtgatcaagcgccacgccagcggtgtacagaggtggagggtgatgaggtggatactcagagcgtgctgcaggattccatgtcagtgcaactgtgagaatacggccaggggccagggtggcgtggatagcaacagtgagaacagacacaggcacagagcaggcagggagttcccatgcacagcagctaagtagcagccccctgtgtgaaagaccccagccggctatgtgctgggcactggcctcaaggagggattcctggaagacggagataattgcacatctaccagggctgattcctgataggactgaggaacactcattaatggaggctacatgggcagtgccaacagaggaactgcagagaactcccttgttgactggggaagggtccctcttcctctcctccctctccctctccacctcccctccctctctttcttatccctctccctctctctcctccctctccctcctctcctccttcctctccccttctctccccctcttcccctctctcttcttcctctctgtctcttccctcttcctctctctcccctctctcttcttcttctccctctcctccctctcctccctcttcctctctcctccctctccctccctctctcctccctctccctgtcctccccctcatttctttctaatggttaatgatcatgtgggaaaggacccaagagtttctggtccccattctccctttgaaaggactccattgaagtctgtactgtaacatatttgctatctcagggtttcaaacaacctttagacttcattgttgacacctttcactattggttagaggccagggaatgaataggaaggaaagaggcattccaggttatgaggtgagctgagaaggtagagaagtggatctctccagcccacagagaaagagtgttgagcccagtagctggtagacaacaaactaatgaaataacttcttaattttcatattctcaatactgttgctgagactctttgtttcctctcacagatgttgatcctgtctcagaatattgccaagctggaggcccaggttgaaaaggtcaccagggagaagactgcagctgtcagtcacttagaggaaattcagaaccacgttgcgtctcaggaaatggacgtcacaaaggtccgagaaagttttgctttaataattggcttaagtacatgttttctttgaaaacatttttcttttaaatttatttattatttttattattgtgtgtgtgttatgtgtatgtgtgtggtgttgatatgtgtatgtatgtattgtatatgtatgtggtgtggtgtgtgtgttatgtgtgtatgtggtgtgtgtgtgttatgtgtgtatgtnnnnnnnnnnnnnnnnnnnnnnnnnnnnnnnnnnnnnnnnnnnnnnnnnnnnnnnnnnnnnnnnnnnnnnnnnnnnnnnnnnnnnnnnnnnnnnnnnnnnnnnnnnnnnnnnnnnnnnnnnnnnnnnnnnnnnnnnnnnnnnnnnnnnnnnnnnnnnnnnnnnnnnnnnnnnnnnnnnnnnnnnnnnnnnnnnnnnnnnnnnnnnnnnnnnnnnnnnnnnnnnnnnnnnnnnnnnnnnnnnnnnnnnnnnnnnnnnnnnnnnnnnnnnnnnnnnnnnnnnnnnnnnnnnnnnnnnnnnnnnnnnnnnnnnnnnnnnnnnnnnnnnnnnnnnnnnnnnnnnnnnnnnnnnnnnnnnnnnnnnnnnnnnnnnnnnnnnnnnnnnnnnnnnnnnnnnnnnnnnnnnnnnnnnnnnnnnnnnnnnnnnnnnnnnnnnnnnnnnnnnnnnnnnnnnnnnnnnnnnnnnnnnnnnnnnnnnnnnnnnnnnnnnnnnnnnnnnnnnnnnnnnacacacaccgtggtactcctatggaggtcagagtcaattttctctttccactgtgagatctacctctggtttcagaccctctgagcaatctcattgcattgaaaccatttttcttttctttttctttttttttttttttctttgcttttatttttcccctctgtgtagacttggctctcctgggactcagaaatccagccttgctctgcctctcaagtgctgagattaatggtgtgggccactgaaactacttttcttattatccaaagctccatatgtcattagaaagaagtttagaatacaaagtctttttattttaagaatagtaaatgttactttagtgagtctgtcaacggccattactataatcgcctcttcctctcctcttattttatggtactgaaaatccaaagctaatttgtagcaaaaaatcaattggcaaagacagacttgtgaatagttctatttaattgttgaatttttaacaaaacttacctgtctaagttagcaaggagtgattctttttctgtagatagtatgagcccggtctttccaataattgcttaaggcatgctgaaagggttgtttgatataagaagtttcctcctctctcttctgtttcatatctacttttaaaatcaacattttctattaaattcttaatttcatcttatatttggcatattcttattttattgattaagttatatattcgtgccttgggcctctctgaccagtgaagtgagaactaaaacatatagtggttttaattgatttattttaagaaatactagtttgtctggatttcaagtaagtcccttgaccagtaagaaagcaaatatttccaaacatcatatataaatgaaatcaattcattatcactaaatttataggtaatattataatacaataatgtatctccttaaattttaatacattttattctattgttgttttaaattaattaatcataatttttttagcctttacattaatttctacttatacaatttacaaaaggagctgtttctcttctctctctaattctccatttacttccatctgtctgtctgtctggagacagggatgcagatgggtctgtagaagaatggacacacaggtttggggatggaagccatggtacttgtttgtgattccttataggagacaccttttaatgaagtgtagtgatggaaaaaatgagtttgtctccacagctgcccaacaggactcagacttcagagagtgacacattagactaagtgactttgagaaaacctccagtcctcagatgataattccgcctcagtagaatgcctagacttactttcgaggtttgttgtagatgaatacagtaagcaatgagctgaaaggactaagaaagtgagagttaaaattaaagaatgaggtgatttttagaggactcgactcagacatttctcatggagtacatttagataaagtctctgtttttcatcattgagaaattgttatttttctgatgttataaattgagggttgtccaattcatctgtccacctattgaagctaaacagtttggaacaggttatttagcattttaagtttatagtgttttgaatggaagaatcaactctcatgcattacagatagacttgtgtatggtgcgagcatttctgatgcccatggagcagcattgttggctgtgtttctgtcttgtcagagctttggaactctgctgcctttattgtttctagagagctttttatctgagcaaagggaggcatgtaggttacatactttactatagtttaatactcaagaacaacaaaacttttcaaagcttctaaaactcattttttaagccaaattgaaaagtttcaggcaggaataaccattagataacatgcaaccattaaaaggcagatctgaaagtcagagaaagcgttgtgatgtaactcaactttctacaggttctcagttatagcaaaggctcatcgtttctttatttagattttcctgataattctatttctcaaatatgtttctccgtgtgagtgacctggactaaagaaaagtaaattacatacagaatagtttgcagcattttaaaggtgttatatatattatttaataatatcacagttatttcacttctaatgtatatttcctcttatgtagactgctacagttataattgtagagcatgcttaaagccagcatatgacttttaccagaagttattttatggtatttaggtcacattgcatacctacaacagtgtggttaatgctggctgtatggtttataataaatgctggtattgtacacctgaacagcaacaatatagtttattagcaaaaactgtcctcacaaaaattttcttaaaatcttagctgaagttttttaaaagatattttataatatagagagaatgaccatctgtgtgaataataacagactttaactgttttaattactgattttagcttgcgtgatttcagatgatagtgcctttcgttgaaaatattcatttgaaactgttttatataatataatcctgaaaattaacttctattccttagttatacattgcattattttatagattttgattgattttgagagggtaatgaatgtacattgtggcattcatgcaactaaaaagacaacttgaaggaataagtttcctcattccaggcatgacctttagattaactcaggtaatcaaacttggtggcaaacatcgctagccatttctcaatgcttccttatactgcctccaaaatcttaaaccatattcaagtcttagaaaagttttggtgtactttatctgtgtgtcctctagggggcaccaaaggatctaattgtagatatttctctgctgattccagaggctactgatctgtttttacaatctaacaggtgtgtggagaaatgcgctttcagttgaataaaaccaaaatggagaaggatgaggtggaaaaggaacacagagaatacaaagcaaagtctcacaaggatcttgaaatgaaagtccaggtaaggaagcacgctggcacagtcagctgtgagctgttagtaacatgttttctgaagttgctgtggttttatccctaaggcactatttctcttataatgtttctaactaatgtaaggacccagttcatactattaaaagaatttcatttatagacgcctgacatgaagtagtgagaatcaactgcttgcatatgaaattccaatttgacagttcataaatatacatttggatatgtatctattacttagaaaaagttttaaaaaatgttctaatgcacagtttgaacctaaaatatacgcacataaagttcttgaaagatgccaacttgcatccaattttaaatgagaaactttaaaatttgtaagatgagatgagttgatatgtaaatatgtcaatcaaattgattgttggcagagttggaccagttttaactacgatagccatgaatctgtgtgctcaggaagcctaaatacagtgaaattagaaatgttagggaaaatgctactcgcttcaatttcagtttgaacagatgttttatgttataactctgttgagattgtatagatactccaattttaattgactctggggaaagcttttaaagagaacgttctggcagattgacttttgatgttctatttttatgttacattataggccattgaaggtttgcattctttacagccaagaaaagcagattgtgtattctattaaaataatatgactgaggtatcagtatcaataatttagagatatccgtacagttcagaagtaggtgactccagataattttacaacatatttctaagcaaggctttctatcatattttcaacatattttccctttcaagccgtcagctgttgatgacaaatgacataaatgcaatggggaaagtattaaatatggaagtgctaatgaagccctgtgcagaatacttcaaatcacagccgaaacccagacaaccagaacaaaagtagtttttatatgagtagatgcaactttatgatgagttctacatcttagaagatctttccatattagcatgtactgattttattttgtccagttgggggcgtccctgatagtagaatggaaagttccctcagtcaaggattgaaagcctaggactcctaagcaagtggagtgctctcttccttctgatatcctacagggttttgcagtcaggttggcacactctgtaatattaaatatcttttgagttattatactgaactacagaagtataatatttcctactaatagaacacagaagcaaagagtttggggatgatttaaaatcacattatcatgtttagcaatacaaaaaacaaagcaaaaccctacagtaacaagagtgagtgtcttaggaaatgaataacctagattaaatcccttctagtgtctgtttctttagcatgctgtcttcttaatcagcccataatgctacaaaggctgaaactgaaggagagcgtccgtgctccctggtggactgaaatactaagtttctctggtcatctttagtggtgccgttgcggtgaagctgtaccctcggggaggacccagtttgtagcagtaaacctgtgagggtgaggagaggtttgcatgctcctgttttttcctggaacagaatgtgaggagagtttgtaggtgctctttgtaactggtttgtcctgaacagacagtttcagacgtagtcgcttctcattcccctgggtgatttggagcagcaaagcagcagttgttctttggtctctcagccatgacctgaccttctgtctgtaagtccgaagagttatttagcttggccaccatctgcacccaggagagaaatttacatttagctttgaaaagctggacatgtcaagcacttatctgcaatacctaccatgatataaaacatatttaattttaaagccttgtgtatcatacagtcatcataaccaggagactgtctcttgggttgcaaacaggtgttccccataatgcatcattttattcatattttagctaatctggccacttggtaggttttgaaagtaggtgggaaactgagctggaatgtggtgagcacaagagcctctttgatgtatacacagccgggcaaatgcttgaccactggaatgattttcctcacgacctgagccttgactctggcataattagaaagaaaggttagagggggaacaatggctgtctcttccgcccactttcttcttttcttcttatattgtgtcaggacccatgggtgaattacccttcccatcagctcttttgtatcgctcaggcttggagagctgctgtcagtctcaggggctgcttctgcaccacggaaaacaaaaggcattttgtgtgcagattgggaactttgtgccttgatttattttcttttttttttttcttctttcctttctttgcttctttttactttctttcttttttatataaacatcaggtacacacacacacaccccatcaaggaacttaaaagcatatgagacaaaaggaacattataaacaacctgtgcatttccagcacttagattcagtgtgtgtcaatcttgtcccaccagttcacagtttttttcttaacttcacctcattatcatatttttccatcttaatttctaattttcctttctcattgtctttctctacctcctctcctttcacaaaaatatttaaaacaaatctcagatatttattattttacctacaaatatgttattgaaggaaaggctcatattatcatattgttactttgaagaatattaacaataattactagcaaatagcatgaagcttatgttgacatttctttttctcaaaaagtgttttgtagttggtttattccaaaatgtagagcaggtgtgtctttgtctgttcaaatggtgcagtactgtcttctttaaaagtaagtgaaaaggacacttggtaagcatgttagctttctttattaggtttccctctgaaggctttgtgctccgtactgtgccggtcgccctgccagagctgcaccttcgtcctctgatacactgtgagcatgtggccgggttgtgcctttgtgtcttctcacgttccagaaggggccagaaactctgaaatgcaaactgcatcatttcagagtcctgtatttcaggttcaggaactttcaggaaactctggctacattacagggttagctcatttgaaatgaaagatgcatctttggaattttctttgttaattttgaattaaataattgagtctcaaagatatttctttgttgcctctcgcctttgatcagggtccagggcaagtaaaaaacagaaaagagaaatgtgttgataaaggtactcgtagcaggctttgctctccttattcttcagtctcttgtgctcctccttttcttcctcctccccccaatcatcgtattttaaatttgttatgtgacttagggatgtataaagcacaagggcacatatagaggtgggatggggaggcatgatccagagaggccagagcatctgaggaagctgttcattgtctgtctgagctctgaagctgcaaatgatagcttaggagaatgttctgagagtagggcacactgacagactatggtgatgggagaccctaccagaacatttcattggttttgtgacttgcttttgcgtcgaagagatagatgaagcaatgtgtactgtactacacaaagttaatgtgtgtgtggtagaatgaaagaagccagtttcgtggggcatctgtaaagcctggtgcccgttgaatagtgaaaaaaattgtttgtggaattaaacaagatagcgaagaatatagtctgagagactgctttgaaaagtgtggcacattgaaattataccaggttggaaggcagcagagttgggaaagcagaatttgcctttgttacctttgatgaccataacagagctgctaaatnnnnnnnnnnnnnnnnnnnnnnnnnnnnnnnnnnnnnnnnnnnnnnnnnnnnnnnnnnnnnnnnnnnnnnnnnnnnnnnnnnnnnnnnnnnnnnnnnnnnnnnnnnnnnnnnnnnnnnnnnnnnnnnnnnnnnnnnnnnnnnnnnnnnnnnnnnnnnnnnnnnnnnnnnnnnnnnnnnnnnnnnnnnnnnnnnnnnnnnnnnnnnnnnnnnnnnnnnnnnnnnnnnnnnnnnnnnnnnnnnnnnnnnnnnnnnnnnnnnnnnnnnnnnnnnnnnnnnnnnnnnnnnnnnnnnnnnnnnnnnnnnnnnnnnnnnnnnnnnnnnnnnnnnnnnnnnnnnnnnnnnnnnnnnnnnnnnnnnnnnnnnnnnnnnnnnnnnnnnnnnnnnnnnnnnnnnnnnnnnnnnnaaacctgggtgttggggggtcgtggtggtagttttggttgtggtctagaaaccttggtggaaaagaaggctatggtggcagaggtggtagttatggaggtcgatacaatgtatttagagatgatggtgacagctatggtggtaatcctggctatagatagaggagactaaggcggtggtggaccaggatatggaaaccaaggtggtggatatggtggtggaggaggctgtggtgggattatgatggagagaatttttggtgcaagtaactctggtggtggaggaaagtataatgactttgaaaattatgatggacaacagctatcaaattgtgggtccatgaagggggcatggttggtggaggatgcccaggcaatccctatggtgacagctatggatctggctgtcgaaatggtggatctgctggcagaaggtctagcaaacagcagaaaatggctatagttcttagaaaaagaaggtggagttgccaggaaagctgcaggttactttgagacagccgtcccaaatgcaagaccaactgtaaggatcagcctcagagggagcgacggtccatagttagaaacatctgcagcttcaaagggaagccctcttgttcacaactgtcatagcatggtttacaaaacattattaattaatgtagtgcagtaacagatatgcatttctgaggtcagttatctcctgtagcttcatcttctccccccacccctttttataccaagtatattgccttgcaaattgctgtatagtgatggtgccagaaataaaaaaattaaggaatatttaacttcagaacaaaaccagtgcttgccatgcctggcactttctggtttctgggatcaaattcctgttctcaccctgctcagcaagtgctttcctgactgactgcccaccctcccaaccctatccccccccccctcaggtttttctagtcaccctgtgcagggtagtgtgggagtcactctcctttatcctaaagggagcaaaaagctttatgctgaagcttagggcatggatggccacctctgtgtcctgtcctgacacatgtatgtgtgtgtacatcccagcagcccaagttcttatctaggctcctgctgggggcaaagacaatacagatcaccagctcccccacttagaggacctgtttccttccacccaagtgcaggtcccagcagtagttaggcttggacaaggcagggactggaggagaacacatttctgagaaccgttccagggctgaagtgacagggaaagacttccacagaggtgaactgaaggtccattggcccatcagactgtcccaagataaaagtcactaaaacttgtgagacatcgatcaaatactaggcccttctttgctatttctggttttgtgaagtaaggtctcaccatgtagcccaggctagtctagaacttgctatactctgtagcccaggctcttctcagctcaggatctcactcagctagttacaagggcttttcaaagtgtcctgtgggactgcattgagaacatggtatcaacacatgcctgacatgctcccacctgatgccaatattccttgtagcagaaaagagttagccaatggagactcattcaagctctgcttctgcctaatttcacaagtgaagttttataaaaacatgaacaatacttaagtgttccatttgcttcgttccggagtggggctcagcagttaagagcacgtgttgctcttgcaggagactgctgttaagttcctagcaccagcgctgggagcgcacgacctgtaactccagctccagggtatccaacatccctggcctcttctgaagcctacactcacatgcacactcacccgcctacagacacttagttacaatagtacaaacagatctttaaaaagagcagagctgagaaggtgcggtagagaccacagagcccacaaaacccagatattatcatgatttctaacctttctaggaagagtttgccagcccttctccgagggctgtattactagaattctatattactagaatgccttactggggagcatcagtattgaattataacttattgcaatttactggtcttagaatagtcataaaacaatgcatgctatatctctgctctcttgaatatctagcagcacttccaggtgagcacctggtgactgtgtctacatttgattagtagcgcatggcacaataacgacatgtggcttagatgaaagtgtgaatccagcattattatttctttacaattttacttataggttaatgtaaattttattttttagaagtaagaaaatgggcatggctttgcttagttgcctacatatggtatatcttggggatgattcttaacagtgagtaggaagcttgggataactcaaagtccttcatgaagtaatcaaagccaatacttaagagtatgcttgcatacacaaaacatcaaaatttatgcttggaaaaattagagagaaaaaggctttaaaagttgctcttagccagcatgagtcagcattttagaactgaaattatgcatggagtgtgtcaccgcaggaattacttcataaaatcagtttactagatatttggaggaaatctgtctatttgatgcaaagagaccaaactaaaccctgcagctcctacaagtcaggctcttttaagaccagaggaatacgaataaaggaaggttggcaagtcggaaaccctgtgtcggagttttcagggtttgggctgattctttctaggaggatcagatctcgatgtttaatgtggaaagtcgggagcacagcagtttaattactgtgacgggtggcgcacagttagtaagactttcctgactataggaagattggaatcgactcttacagtgggccatggaatgagcttccctgaaatagttttcttttcttttatagagtaacagtgtgatgtgcctcaagacctagattgtgggcctctggagcgcactatgtaattctgggaacactgagccatagaccgatgagtttgttggaagtgggtagctgcagtgtttgtcttttctacttgtgacgttagcacctacagattagaggaaatctcttgcagctctcctctctctgaagctgtacactctgttcagcagcctgagataatggggaagtctgagagctagacttcagagactcatccagctaccacccgccatcacacttctccctctaccgagtgcctgggagggggccacatgggcatggctttggtacatgtagtcacgtggtcctggtgatgacagcaccgcttgccatcttcttcacgctctctttcagcgctgtagtcttacacattcctgtcccctctcctctgtcatactgcacagcttgcgggggtatggcttacccagaccagattactagactctggggtaaataactgcaagtccaggtcctgcccttggggagtttatattctagctggggactcagaatccgcatttgagcatgccgtaagaatacttgcaaagcagcatatcgacaagtgcaaattaatgtagtgtgaacttcacgctggctgcagcccacgagggagaatctggttccacgtgtgcgatgtaataaagcttccctaagtatgccctcaagcagtgttcagcatacttagagaaatttgtgttcctatcacagcctaactgagatttctgggagaattcttcaacctagcgtctgtctaataagcctctgtcttttgttcttatcctgggtgatgccccggtacaaaatagaattcattggattatgcagataatttaacatatctctacttaataaaggtcttacagtattgagcttatttttctaaagcacgaagccaaataaggttttcatttaagtcaacactatgttggtaaaaatcacaaaattggccataaaaaagtaaatgtgtgcttttgctttgtcgtcacagagatgcaacttcaggccagtgtggcggggacagcaggccagtgtgatggggacagcaggccagtgtggcggggacagcagatcaagggccttcctggctgcactgcctgcactgcacagctgtgcgctaacaatttcctggttatttttggtgacaggatgtatatatctcagactaaaacatagaaacatacatatatattcatattataatcatattatttattgggttttacttataatttaattttccagaataggtgactattctcttcactatagttatttttttttaattaaatgaaaaatagaagtagacaaatcgtgttgatatcaatggaaaatactgatttaagcctatctaagagataaaggcatcaatagaaaacaaaacctacacattgggaagtaatatgagctaagcatttgttaacagactctttccattggataggaattgaaaacgataagctgaagtctgcatactttttaactttagatgttgactcaccaggctaccctgctgggccttcacagtgtctacttacctgccaagcctgcaagtctggttactattaggtggcagcagttatgtgaatgtgtccctgcaggccagcaagctgacaggcattagacgtgggacagctatactatgctttaatggctcagaaatataccagcaccagtatccagcatgagcttcactaattaatacctgagtatacatttaaaacagtgcgtacggtacaaacacagacacattgacagaagtgagtgactctatatcataaaatggagcaaactggtttttttgtttgttttaccttctgttttgtgttcatattcagttatgatattgcacgttgcaatcacagcctgcggatagtcttgtgttctcccttttcagtgaatattatcttaaacatttttgtattgcttctgttttttttatactaatcaccgtaatatggccatttacataaatttctgcaggaagatggtaggtcagattttgaagaaacaaagccttgacatttagaatccagccaccttagtcttcacttgctgctctagtccagcagccatatgttttgtgcattgtgctggcctataatgaatttctgtcaaagagaaaaggcaaggtagctatgcaaatccatttctcatgtcagtatcagcaaactacaaaaggacctggggacttggaagagggaaagatggcatccttgcaaggtggtcaggatgttgcttagcgcagatgggagaaaagggcatttggctagaaggtccaacatggaagcttgagcaaaggagtgagaaaggggaacacagtcagggaaaatacatgcctctgcctcctagcattagttagctagcagcatctcctgtgtggtcctttagaactgtctgccgtggagcaggagcatctgcattgtgctgctcccggctaattgtgtgtgcacttacactgaaggccctggagtccggcactggtaaggtgctacactttagaagtgtgtgtgtttgttcttcatttctttttgtagtattctctgccactccacatttttaggtgaccttgaaagggaacccaggctgcatgcatgctagcccactagcccagtggtagagcacagccgttgaaccagcgtccccttcttggagactgagtctcactgtgcctcgggggccaccataggactcccaggcttaagtgatcctcctaccttggcctccaccacgtctaccagaaaacttaagattttcaacatttcgaaatacacaataacattttattggcaatgttaggatcaagtaggagtttgtttcctagaaataaataattgggttatcttgatacatagagcatttccaatgtcttatgatggggatgaaacagattatacagggtgtatctgtatgccatgaacccaaagacaacatttttcccctggtgctggctaatgaagccagaacctcatgtgtgtaaagtatggactccacctctcagccacatgattgcctcaaaactccttgctgtggcaaggaggaagcctcctggagatgcacttcccttccaggtaaacatagaaggctgagaagtgaagcacccccccactctggttttaagtttttgtatttacagaacatattctcttccccactttgaattttgaattaagtattaataaaataaatagaatctgtacagagtctcaaatgccactccacactttccagttattcactctcattttgaaaaaaatgacacctgtattgagattataaagctttattctcaacaattttagatcaaattcttgttgtgattaataatgaaataaatgcctagccttttaacagtttaatttaattataaaacagtcatcatttaattttccataagaattgaaccctgacactaagttaaggctactatttattaagcatcagcaaactgtcaaagttggaacttggggatatggtagcttttctagagcatatgaaattcaacgtcctcagccagccggagtatgccacagtgggagcgcatgataaaggggatgtatctgtgactcctatttgaaaagcacagtgttcacaactgattttcttttcttctttcttggcacattcaaaatgcatccatagaatgaagtatggatgttccagaaacaggtgagctataatataattatcttaagtatgttttcaatgattaaaatgaaaacagaagatatcttggatcctcaacatgttccctcaccttcaggagtttaatttagggctattaaaggtgtatagtgttttaagccataatgatatcattatatgataagaacaagatgttctatgctaaaggaagattcaaatatgtcagtcatcttttcttgactgtaaggaacatctgacaacagccaacttacaaagacaaagggtttttctttttttaagatttatttatttattatatgtaagtacactgtagctgtcttcagacacctcagaagaaggctttaggtctcattatagatgattgtgagccaccatgtggttgctgagatttgaactcagggccttcagaagagcagtcagttctcttaaccactgagccatctctccagccccccaaagggtatttcttgactcataattttagagtttcagtctactgcccattagctctcttgtatagatttggagtgaggccacacattgtgttgagagtgcgtgacagatcagactgacccactttgtgtcaggaaggaagaaagagaaatgggaagacacagaagtctcactgcccctttggggccatgtcccatggcctgagatctcacactgggccctatctctttaagcctctaccactttcaggtaaagctaggctggagaacatgcctgtgacatgtggcactttggaaccatgacagtgacacactaatgactttgatccagctgcacttgaaagtctatgtgtggttatgtattccagcatgtctcagcaatctgtaaccaagaagtgagactgaatgccccccccttaggcaagccctgaagtttaaagtgtcacatgctgaatctaacaccctttacactcacctcaccagccaagagtgcaaacaggcatggtagaaaagagaaaaacgtgggaaagaaaagatgggaaagattttagaagatgaccttgtaatggtgtttgtgttaagaattgtgtttgggtcattctttacatgtcctcaaatcctgtgactcggaaggggcaactgtgatcaaaacccatcaggataacaaacactgcagttatgttcagagggaaacacagtagtggtctttgaaacctctgattagtaaagttttcttctctctcctattgctgcttactagcaagtactgtcacttagggtttttcagagaatgccttttgtggtatctaggaataagatgtatggagtgagactgagatatgttcactgcttgagcctttccctaatacacaagaggtcctgggttccattcccaacattgaaaaaagaaaagacaaacaaaaacaaaaacaaaaaaacttgggagacaggtggatttctgagtttgagtccagccttgtctacagagtgaggaaagaaagaaagaaagaaagaaagaaagaaagaaataaagaaagaaagaaagaaagaaagaaagaaagaaagaaagagagagagaaagagaaagaaagaaagaaagagaaagaaagaaagaaagaaagaaagaaagaaagaaagaaagaaagaaagaaagagaaagaaagaaaaagaaaggaaggaaggaaggaaggaaggaagggggaagaaggggaagaaggggaagaaggggaagggcaaggggaagggaaaagaaaggggaaggaaaggggaaggaaannnnnnnnnnnnnnnnnnnnnnnnnnnnnnnnnnnntgtctcttttgtgcagtggccacatctaaatgattgaagaaaaagtctcaaataataaacactgtctagaggggcccttaaaactcaagagtaataacttagcccagccacattttataggtgattaggctgtaagtgagctgtaattaccttatttctatgtatttattaatgtaggctgtaagtgagctgtaattaccttatttctatgtatttattaatgtaatagtattgttattcattttacatatatgatgtactgttgccgtcttcagacataccagaagagggcatcagatctcattacagatggttgtgagccaccacgtggttgctgggaattgaactcaggacctctggaagagcagtcagtgctcttaacctctgaaccatctctccagtcccttaatgtaatagttgttaagaagtatatgtcacatccaaataggccaaataattccaataaaagacgaaatgtctttattgctcttagaattcattttgatttgttttatattgtttcgagagtcttgctgtatagcccagtctggcctagatctcactatggttcttcttttttagcttcttaggagttggaattacaggcacgtgttacattactggctatatgttacattaggagtatataaacaatgtttaaattttaatactaaaaggtcaggcttctttaaacctagagaaattatttgcatagagatttctttagagaaaataaccaaatggtaaaaggtatatgaaaggacacttaccattaactgtcagagggatgtaacaaaactcatgtgagataccacactacatctcataaccaattggtaaaaggcatatgaaaggacacttaccattaactggcagagggacatggccaaactcatgtgagaatccataccacatctcataaacatagctctaatttaaaagacaataataataggctggtgaggtggctcagtagtcagaaacacttgtcatgccagcctgggggtctgagcccatgcctggaacccatggtggaaggagagaatagactcccgaaagttgtcctctgatttccacatgtacactttggcatatgtgcacttacatgcacatacatgcatcatatatgtacatgcatcatatatgtacacacagtgaatgaaatgagacagtagtgccatgtcagcaagaccgtgcagaaatcagagccctaattttttgttggtaggtttgtaaagtggttcagctgctgtggaaaccagactggcagctgtttgaaatgtgcctaccctacagattggggtagagggttagacgaaggatatggtcaagcattcaggcccccaaagcagccagcctgcagtgaaattctcattctactgtgttacctggtgagcctcgacaagatgcctaagatgttctcagtttttagttctctataaaatgataataaattcaactcctgctctatcaagtggtgtaaaattagaggcagtttctgttgaccagcacagcaaaatgcatgccatagagttgcataataaacattagtaagttattgtatatactaacattacgctcatattcacattgtctccctaacctctcttctatgttcctttctttattccttacaagcttcttggtgataagggatcatgatgctgcctggaccagtgtatggctgggtggtcatctgttaatctagctttcagaggtagttatcatttggattgtgtgtaagccacaccttccattgtgagatcgtattgaagaaaattacagttaagatccctaatggcacatatctgccgccctggagttgggcagtgacctgtccttggctctttctcaaaaccttggttatttttgtttgggcccgttctgtcaagcccctggcatccagtttctggcatataacgaatcatctctctgtctgatatcacatatatttgacatatagtgaatcgccctctctggccgatgtcacatacacatttttatcactagctgtgttgtcctcaaaggcttgagccgtagggcatgggtcacagcagggcagagtcctgtgacaagtgcttgaaggcctctgaacatcttcatatgcccaggtccataggatttctgactgatgtttaaaaaacaaaatcatgtgtatttttgtattttaagaaccagaccatataccttcaacataatttagttaagtaaagaaatctttactttttttcagtttatctttaaaaaaaattttgtgtgacacaatggggttcattataccattttcttacatattatattttctttttattcgccagtccccttaccctctcctaacctcccctcatacttttgttggttctctgctctcccaaatagtttctaccccctcctgcctctatgtctacatattctattaccctttcttgtcctcttatcccctttagaggatctcttaatcccctctcatagtctgcctttttcttgtctgtctgcctgcctgcctgcctgcctgctgcctatctatctatctatctatctatctatctatctatctatctatctatctatgtacatatacacttatctatcatttatgctatatttcatatacacatacacatatacacacatacatacacacacaggtacacaannnnnnnnnnnnnnnnnnnntatcacatatatttgacatatagtgaatcgccctctctggccgatgtcacatacacatttttatcactagctgtgttgtcctcaaaggcttgagccgtagggcatgggtcacagcagggcagagtcctgtgacaagtgcttgaaggcctctgaacatcttcatatgcccaggtccataggatttctgactgatgtttaaaaaacaaaatcatgtgtatttttgtattttaagaaccagaccatataccttcaacataatttagttaagtaaagaaatctttactttttttcagtttatctttaaaaaaaattttgtgtgacacaatggggttcattataccattttcttacatattatattttctttttattcgccagtccccttaccctctcctaacctcccctcatacttttgttggttctctgctctcccaaatagtttctaccccctcctgcctctatgtctacatattctattaccctttcttgtcctcttatcccctttagaggatctcttaatcccctctcatagtctgcctttttcttgtctgtctgcctgcctgcctgcctgcctgcctgcctgctgcctatctatctatctatctatctatctatctatctatctatctatctatctatgtacatatacacttatctatcatttatgctatatttcatatacacatacacatatacacacatacatacacacacaggtacacaaagataggggtgagaaagagtgcctctttctgcatatagaaagaaatgaggcaaaaactgtcctttttgattgtggattattatcatttagtgatcttcagttctattaattttcctgaaaatgctgtaatttcatttttcctttcaagtaaataaaattctattgtatacatgtatctcttttacatcttatgctatgctcttctatctattttgaacttatctttacactgtgtgagatagatggatctagtttcatccatttacatgtggatttccactttgcccagcactgtttgttaaagagacccctgaatagatttgaagacagaaatcacatgatcctctcaagagatgcagggaaaatctttatcagagctcagcacttcctcatgataggagtcctgagaaactaggtatagaataatagacttcaacatagaaggccatgcatggcaaatctataagcctatattattctaaatggaggagaactgggagcctttctttaaatggtgagtaagacaagaatgcccactgttcactcctgctcagtttagtgttcaaagtctgagctagaacaatataagagagaagcaaaagggatcagagcagggaaggaagaagccacaacatccttatttgtagacagcatggtcttatccataaatgactctgaagaatccatcagaacacttttaggtatgctaaatactaagcacagaagcagaatacaaaaccaatattcaaaaatctgctttttatgccaataatgaaattgtgaggaaaaaaagcaaaagaaaaaattctcctttactgtatacgtatgtgtgtttctgcatgtgtgtatatattttcatacaaatcacatacatatatatatacctgtatgtatatatgtatgtatgtgtgtgtgtgtgtgtgtgtgtgtgtgtgtgtgtgtgacatatgaataatcaaataagtgaaagttctcacaatgaacatattttgatgttgatgtgtatgggccctgcaggagctaagggcctttaatgtgaatggcctgtggtgccatctgaggccaaattaaatgtccatggtccttgctgctgtagagagccatgattggttctgtggtcctgctgcagccatggtcatgtggaagtccctggcctgtgctgcagcagagggctgcattgatgtcagtgctctatgctgtcacctgagaccatgctgaagtctgtggcctatgctgaggtgggagaacatgtgcatatctgtggtccctgctgtcaccagaaaccacgtgctatgatctgtgcttccactgattgtaaactagggagctactttagcagggtatcaatgactgaagagtcacatctgagaatgagggacagagaaggcttctgtgacaaccctcctcctccccgcaaagtaacagcctagataggaaaacatggaagagaactcttaaaagttgtggtaagaatgctaaagtgtagctctgcacaattgtggcatctggcagtgtacaggtggatatggactcagtttctttaatgggtggtcctgggaggttgaccatgctccagttagaatctgagaaacacaaattgtatatcttttatttcttttgaggggccacaagaggcgggacagacgggagggctggggagtgattgtgactagggtgtatggtgtgaaatttccaaataatcaataaaaatatattgaaataatattttccaaaatttaagaagttcaagaaaatactagagaatggaaaagccttccattctcaagccctagcaggagctctcagcagtgaatattgttcttcctggaatctgaggtcaattcctagcatccacacagtaggaggctcacaaccacctgtagctccagcttgagaatatctcatgcccctggctggcatatgtacccaaacaggcgtgacgtacgctcacatacacacatgcacatgattgaaaattatcaaattattttttgaagattggcagaattaatattttgaaaaaaagagatttgtagaaaaaaaaaaaagatcccaaataaccaactctgagcagtgggaacagtgctggggtattgcaatgtgtgattgcaagctctactccacaaccacagtaacaaaacctgcatggctctgactcacatgaaatatgtccataagaatgaaatagtctcctcatttttgtatctgttgtgtactatgctcaggcaccattgatctgtgaaatagattatgttggtggaaaattctgtccaaattaagcatagacgtctgaagaaagttcctccaaaagctatggagaacaagtgctgctcatacggaagacctaagcctggttcccagcgctccagttgagtgcctcacacctctggtagctgcagaatcagatgccctcgcaggccccagcaggcacctaccctcacctgtgcatatccagacgcacacatgtaatctttaaaaatatgaatagctcgagaattgggaagatggaaatatgtgtttagaagttatcagagggagaggaaagtagaagggaacttgtctgaaattctgatttttcatataattagtatttcagtgtatgggttacactggaaattcagactagaatctggggcccttgtccggagcggtgctcacttcgtgaagctccccgtcatgagcaagtgctccatcctcatcactccctccgcctggcttttctatgccgactttatttttctctatcaacatgaaataaaggaaactgtgttggtttcttaactatccagaatatcaacttactaatgtaaatgagggtgttttgtagccatgagaagccaccattacatgtgtccaggactggtgagtggatacatggtccccaaactgagcagataaattcattcctttatactttgctgaacttaaaagaactgcactcagaatcttattaataaaaacatctacttcacatttggggctgctgtttaaaattagcctgaaaaaatgggttacttttttttttttggttaaagccaagtacagtaaattcataagttctacaaatggaattttacagaaacatttttataagacatagctaaagtcagtttttctaaaaactccccataaggtgagatcatgaacgccatgctcaatacagaaggggtttttatttttctccaatcagttgtgtttctataaataaactgtttgttgttaaaatttgctgtttcctcgtcacgtaagaacatctcattagttttggtgaaaaccttccaacaaaataagatgaaattgcccagttttccagggaacagaggccccaatggtcctgcgcggcagagtacagctaggaggtaagttaacataggactgctgtgtggtcagggcaggcatttgaatctccagaaacattcaggcagcagcctgtgggcttgaatgcctcagtgtgcctcaagtcacagctcctcctctgctccctttggtgacaaagccattgctgagcagggacactggacaacaaaagcgactggagtggggtgaccatggagagagccagtcttacggtgctgctatatcatctagaaccaaaaagtgggtttccatttttccttgctgaagttgattagaacaaattctattttttttccctgtaaaacaaaatcatctttttgaagtaaaaggctaagaggtcttgggtgggtaaaatgctgaaagttttcattgttagaggagaattgttttattttgctcccaaatttgcatgaaatagtgaatttgataaaatgaaagtctaagaaaatctatttttatttgcagaaattatatgtattgtctgacagtaaaaattaaaggagtcagagctagaaactgcattaagtcagatgaatttagctaagagaatctacaaaagaagaagaaaaagttgttgttgaaaccaaatgtggatttagtactttaaaaagtgaattgttgcctgttgaagcttgtttcctatctatgactagttagcattgcgattgggcatcgttccacatttgtagcaaaacctggactagcaaagatggaagcctgggctcctgtccggttgaatggacttggctgactgggttccaccactgtgaagtgatgggtagggttcaggcgaggactgaagaatgccgtccttagctatctgtgctctcttcctcccatgctcccgttctgtttgcagtcctagaatttgtttctacatgcacatatatttattaaacaaacaagagaaatcttgagggatgggcagagcacactttgtaagatagatcaccagcacagatgaccttaaaaatgtgcacaggggctctcaagtaaccgaagagatttctgatgtatatatatatatgctttagaaatcagactctttaactgattattttccagacagctgtagaagtaacatcacatataagaattaatttagggtagtataaaaataataaaaatttcactgttagtagaataaatatttttgtttgcttttctgcttgcaagtaaatgaactaattctctaaaacagtaattttcaatagctgatgtcataactgaaactctgcttattattaggatggctaattgttcacatttctttggaaattgttgttttaatagttagtacttttatacctatatcaggtttgcttagtcattaaaatatacatatttttattaataactatgttataaaaaattatatttgactattaaaaatccacactgaaagacctttacactgagaaggcatctaaagtattataaattttgaacaaacttttaagtaacctatttgatttattattatgaatagtatcattcagtcattttaaaggttataataaaaaaattgaaagcattaaaaatctaataataaagatattttcaaggctgaaaaataataaatcttatgtgtttaaatttacatatcaagttttgccatagctaagtaagatataactttatggataggatatattcagctgatatatattgtattaataggtagtaaaatcatcttggtatttcctggaaatactgtcatactgtcacattgttgtctactgttgtctctgagcactgcttcagcgtggcttctctatttaccctgtctgttcatgtgggaacggagggagttgcactagttagtagtgatcagcgcacaccaaactattttaatctcactttcaacctattatcaagagaattatctttttggaaaatatttatagctttgatagaggcataaaataatcccaaagtagaataataaggtatgaaatccatggttggacttaatgtagcatgaattctagaattttaatgttattatttataagacatttcctgatataaatcttataagaagtaaaccagaatattgtattgatttctcttatttactgtagcttggtggttgtaaatttgagggagaagcggtataaattatttatatgtcagtgaatttaccctttttatcaaaatgataagcaatcattataaaggacagaagactgagacagattgcatattttgcatgggtagtgcgcatccatgtgtgcatatctgtatatgtatatgtatatgcatatgcatatgtgcatatgtatatgtatatgtatatgtatataattggatatctgatgtgtatatgtatatgtgtgtatgtacgcacacacatatgtttacatatatgtgtgttgggggatataagacataggagaaacttacaagattcataatcattgatagtactgaatcaaggattaaggagttttctttttcaaatttatttcatttatgtgagtttgtctgtctgtttgtctgtgtgtctgccacatgagtgcaggtccctgtggaggccagaagagggcattagctgctttggagctgagttacaggtggtgtgagcctataagtatggggggttgggaactggattctgcccttctgtgagagcagtacacattcaaaactgctgacccatgtctccagaaccatgattttttttttcattaaggaaaggaatatttaaagaagtaaattaatacattgctctctcaaactgaaatttttgtattttatttttgctttgtatgactttagcaattggtgatgaaagtcagcaattgaagccagcattttctttctcactgtggagtgttctgagtcactgcttagagtgtcttcttttctcacattggtttccttcccctctctcctctttgccacttctcctcccttctgattttccttgtctggagatagatagccatggactcatggcctgtacatgtgaaacaagtattgtagccacagttgtagacttttgttgttgttgttgttgttgttgttgttggtagtaggctgttttctttatagcatttgtacttactagattgtttttattagtgaaaagcatgtaaaacaatttcttgatgtatgaaaagtgtattctttttgtatggggattgtcttttcagaaaagagaaacccagtttttgaacagcatttatattaattctttgagactcttgcgcagcatattttgaacatatccactacctttaacttctcccattacaaccatcttgacccttgaaccccttctcacccaacttctccaccaaatctagtttgtgttacccagcctgtcttgggaatggcacctatcttggtgtatggtcacaccatgagcagaatctccttccttgctctgagcagctgtcaaatgcctagagctctccagttagtggtggggttgtgcccaccttcccgctcttacacaaggcttttgtctaactcagcatgggaaggtcttgttcttgctgccacagccaccgtgagtccatgtatgcatctgccctgttctggctggagaacaccggttccttgatgctgtggagcacctctggcttttaccatctttgcatctgaccgatggcaagaggagagtgctctgtgtgtctcagtaggactgagctctctacatcttattttccacaagtcaaccaattagagtctctgttagaacttcctatttttgtttcagatttttaaaaaagaaacaactctagacattttttttctcttccactgtagatattgtatatccagcatgcttttgaaatgttttcaaaaggactaggtcagtttagtgtgacttaaaaaaaaaaaaaaaaaaacgaagtcagtttgaagtgactgttttcctcctttctgcattcgcgggtagtgttcacgtgtgcacgcatgttgtgtgtgtttgggcatgtgtacatttgggagtcagagaacaccactgtagaattatggctctcctatctttatataggctccaggatttggcttgggtcacctggacatcctgacagcttcctaaaacttgtgttaatttgtctgaaaacacaagttgaagactcctttggattggctactcttgtttaggagtggaggttgtctccatcagctgaacctcccgcttctctgcccagggactagactctaccctcttagaagaaggagtgagtcacaatttcttcttggctcctcctattcttttgtttgttttacattccttaaaacaagatttcatgcagctcaggctggtcttgaacttactgcatagcctggctggctcctgcctacaagtataacttaccatgccaatctttcttttagaaactaacactcttcaggcactagttcattaaataacataaagtcaatttgaatgtattatatatatacatacatatgtaatgtattataatttataatatacatatattttaaatatatgtctatatttagatattatatgtaaaacatgcatataaagttaattttatatgttagcattttaaatggaaaatcatttctctattaaattggaatattgaatatattgctaagaaattctttctagaaagttagaaactcatgttttattgttgttgttgttgagcattctaatatggatgttttatttataagcacaaagcagagttaatctttttagttatgtttcttcacagacaaccccataagactgtggtagtcaatgtgagataggacactgtataaagtaagaaacggccaaagatccagagtgtttgaagtttattaactttgtgaacaaagatcttataatctagccatgaacaaaacaaaatagagaaatactgccctggatgccctggcaccaactgagggcatttttacttgctgaagtgttaaacttagtaattcttgaagtgttgggtgtcactcagctaggctggggagtttaagaagctgttatcttggcagttacaacaaaccctggatatttatggtggaaaattcaaagatcttcacagatgacaagagtgaagatttttttctatttaacatagttaatattactgacctcttccagtgtgccaggatgggctattgaaatatatttactaaaataaactcaatgtgcttcattacagtggcttgtcattttaagaagggaaaattttatattaccaaacttaatcttgaaaaatctaagttgctccttatttagtagtctagatagacttgcacatatttatttttgtgtctagtgccacattttcctcttagactgcaaacattcatatgggcttagtttgctttttgctgctgtaatcaaacaccatgaccaaaagcaacttggagaggaaaggtttatgtcagctgacatcttactgtctatcatgaagggaagtcatagaagaaactcaaggcaggaacctggaggcaggaaataaagtaggtgtcatggagaaatagggcttagtagctccctccccctccccctgcctgccctccccccctccccccaccatggcttgtttgctttgcttaggtttctaggaccatctgcataggggtggtgccacccacagtgggctgaagcttcctacatcagtcattagtcaaattggtctataggcaggtctgtggggaggattttttaaaatgaggttcttttttcacagatgcctttcagtatgtatctagtttccccacaagcccccaaaaaacaactaactagcacacttaccctttctcaaatttttatatactctttctactactgttgggataggttgttctttattcagagagaaacagataaaccagttggtttttgtatggagctggttttatgtgacagttagccttatttctttgatgacattacatttggtattgtgagatgctcatatcatgggaggtgtgcatgtgctatggatggacacactcagcagactggtgtgtgccatgtcttacagcagtcctcaccaaaatgaatgaaattagaacattatgtgggattgcatccattacaaggtactgacattcaactccaggccagaaactgaggactctccaggtagaaagtgaatgatccatcctgggcaggttgcagacaggtgtgcttctgaagtggtgggttcttgccatcactgtgagtggcagttgtctttttataactctgatttcaaagcacttgcttatattcaaacaatgaaaacctgattctaagaattttaaatctccacattttttcatacacacgtacatttcattttgattatattcatcttttctcccctccaactcttccaatgttccccatatgtccctgttaaattcatttcctcctcttctataatagtataatgatgatgatgatataattttatataaaaattctaccaagctctgtcattgttgcctgtatgcccatgaggagagtagggccaaccacttaggcatggacagcctattagggagctcatccctgcacaaaacgtattcttccttcctcagccctcaactaggggtggtgcctagcgagctcttcccacatccacactgggatgcaggctggtggggcctggggcaggccttgttcagcaaccacagctgctgtgtggtcatgtgtgcagcatccttgcctgttcagaggatacattttcacagcagttcacccggtcatctggctctcacatcctttctgcttcctcttccctgatgtcccataagagttgagtattggggttgtgttacagatccctcattttggggccgaacattccatacacacttattctctgtactacccgtgactctctgtagtcgcctccatccattgcaaagagtcctctttgttgagggatgagagatgcgctgatctgtgtatataaagatatgtttttaagtggcaattagataccatatcaatttattaaaatgatagtaggatgtttcttggggactagggcctctaatatggggtatgatgccccccaagtccatagactaccaaaaaacctggtgcctgttgtgatatagctactttagagttgttggcttctaagacccccccccccaaaaaaaaaaaaaaaaccaggatagtatcgttgttattcttggatggctgccaaaacttgagaaaaagacactctgcatacttttgtcacaggatagggagaaatcaagctggtatcaacctggatgccccttcctgaagctacctctcatagtgtgagaaggtgctaactacattgggacagagagagttgtcaatgtccctacctacctgcaagtcttgcaaacagtaatgactactctggcaagatatgtccaaccaacagctgtaagactgaacttaaaagtatcatagggagggaactcatactgattctgtaaaactaaacaaaactcctcgtgatgaatggtgttatcaacaatcaggagatacacagtcctgattccgtcattatttatggattcttcatttgtttcaccactttttttttccaaaattgggagagttaaccctttctcagctgactcatctctcgcctcagaatcatcttgtctatgctacctcattttggtctacacttttgggtaatccttatccatttccatctgtgatcccgctcgctctcagtcatgttcataaaacattaactactcttgaccacgcatcattggaaaaaattattacttcttttttctttcatagcttttcaaaatcacatcccctttgaaaatttacctcatctagtttatcttaatgttcctttatttttaacaatactacattcaagatctttctgcctgtggtggttacaatgtgaatctattaagtgtaccatacctggaagattgttatgtttaaaacttttaggataatgaaagtacatgacagaattaggggtaaaaatgcaacaaattttaaagaaaaaaatgtagagtttataaatgacctgatattttgtctggagtaaaccaaactacgtacattgctgagaccgggaagaacgaccccttttatcacgtgtttagagaggcagagtggtataatagaaagattgagacttgaaatcagtctaacccatttttcatcccagcttcacactatataatcctctataagctccttaacatctgtgtgcttcagtcttctcacctgtgaaacagaaatagaatgcttatttttacaaggttgtcatgaacacaaaacaaaattttaaaatacagaatgctaaagcagtgcctggacatatggtatcagtgttgttctcaggcctacaataaaaacatgtgaaccagtgttacatgccaccaccaacagtagctgtgaagaggatccctagaatgggctcagcaaacctctgtatctgctgcagtgaaaggcaccattgtgagtcctttccaagacgattcaggggccacttatcctttcactcacatagactcatttcctcaggaggtcttaaaaatacaatgttctttgctcaactctggtactgtcaatagaaccttctgtgataatgaagacattttatgccttgctgtttggaatgtagctgtgaccactgcaaacctacagcatcattcattattacacacaaatgatcatgttctgccctttacccagcagagctttagattctctctagatagcatgcattacaggtggatgaaatcaatcctaccagggtaagttctttcgactgtagattggtcactactgagtggctagcaagtctgttcttatccgtacgttatccgacagatggttctgccttaccattcagcatcatgcactgctttccttttcaaaacatattgtattaatttgaccactgctttccaaatcacaaattgacattgtcaaattatgtcagcctcaaaaccacgtgctcttccttctggctgtgcaaggatttttaaattctagtctccctactctcttgtattttggtccttttattccattttaccttctgtaacacaaagaagtcaccctatattaaagatgacagggcacttaagaacatttgagacagggtttctgtaatcctggctagctgagtctattctgtagccctgccaggcccctgacatatacataccctcctaagtgctgggaggaccagagtgttctagcatctccagctgcaaaataattttaaattcaataatatttgggagcaggcttaataagctctgtctgcttcatttgctttccaggaaaattattctttgggtttaaggcaatataacctttttgtatttctctcctagaaatttgtgagaaatatacaataggaattttcttaatgaaactctctattcgttcttaatctatgtaatttaaaaattactaatatagtacatcttcatttttaaagttacaagactgtaaaactaattttataaggtcacaacaagaattctttaaagagaataagaattaaaagattgaaaatatgaacatgtatcttatatgtggaggtgacagttccttcatgagattactgttacatttattcatgtttttaaaatactctgtgtgtgtttatgaattgataccaaattgatgtttattgatcttggtagaaatgttttgaaggttacttcatagtctgtgatagggtttttggagacaaagtaccagtttgtgttaagaccccagaatacttctttaacacctatacatttctttgttaatcctcagtttcttctctgtacagagatttctgtcttaggtgttttatatagcaacttcaaagctcaaatgacattccaaaataataaatagtttattagtccttattcctttaaagtcaaggatgtttttttgacaaagctcagaggctcacagcgatgaccacaaatacttatgttcataagtgctaggcagctgaggcctggctgatctggacagcactggggtggcttcgtcagactgtggcttgtctggccacagtctggtttttgtttgtcttcatgtatattctctgtatggttcagaccgatggggcagcagcagcaacactagataatggctttttgtttttttgcttgtggttgtttgtttgtttgtttgttttgcctttttctcagagaatcatcacagcatgaagataaaaccaatttgtgcttatattaagataccattggctaaatgaagtcacatggttaagttcagagttgttggggacatctagtatatccttctctcagtggggagggaatcaacagtacataataaaatactatgtgttatccaagcctcatcacatctgtgcgttcactcactgcctacagtacaacagaggggctaaaacaggcagacgggagaaagcaagaacagaaacaaaaaggaatctgcctatgtcttaaatctgccccccaaaggcttatgttttaaagtcttagttgtctatatgacagtttggggaggggtgagtgtggagaaagtgaaggtgtttgggtctggcggcctcgccctgggaatggactagtgtcttccctgagctcctatgatcacggactagacttgatatgcacatgagaagtcttgtaaagcaaggctgcagttgtgttctctgtgctgtacgagcctgtgcttccctttccacacagccgccagtcctgagctcccaggctctgcagccatgacccaaacgaacctcttcctttataggttaccctctcgctctgatcattttagcaaaagtagcctgtaacaaacctgggtgaaactgaggaggtatggataatgaacataagagaatctatgaaacactgtactttctaatagatattttatatgaaaaataaacatagatgttatataaaagtgtaagggcatgcaggaactaacggacaggaataaagacacaacatattgttttcttaatttccatagaagaggtaactctaggtgctagactctgaggagaagatattagtaatttaggtaacctgttcagtagatagcatggtcagtgatggtgccagggctatctagaaaatacaaagtgtctggcattaaaacatttaaaatagccattcaaggtagtgtcaccaaactaaaagccaaaccttagacaagcctccctattgaaaggggtcactgcgcacaaggacacaaagaatgaaaatgtattctctgaggttatgctctcattaaactgcaaagtgactgggaaacagtgctgtaagtttccaggaaaggaaaaagcaaattccagagcaattattagaaatcagataggctcttcagtggtgtcctaagatcctaagatgacagcgcagattctctactattctgagggaagagagtcttcaaagtcggaggttgtcatgcacagacaaacctccagtttatctgtaagcagctgtctaaggacacacacacacacacacacacacacacacaccacactgttgtgttttttaagtttcctgtcttaggaaaagtagtaactctttattgagaggaggggagccttgctggccttgactttatagagtgctcagattaaccacatattctactatgcctgaccaacaagcacctcttaaggtgcattagggatggcataaagaattgatataagacagataaaagggtcagaagtaagttaaaatatataatttgatatttcagtattcaaaaatgttattagttgactatttgactattaatgtttaatacttatggagacatatcagttatttagaaaaataaattattttaagtgggcaaccagagtgaagttatacactttttttccctggtatttatgtgctagtgacagggagggccatttgcatcttagaatttgaagccagccttcacaacacagacccagctcaaaagcaagcaagctatgctccccgtatacaataagaggctattaatccccaaataaataaaatattaatgaagaaaattaacaaaaaataatgtttgtctcagtagaggaaaaatttttattatgatgtgatcaatcactaatgtatcagtaatgaatactgattcatagctagacttatctgagggtttgagttggatctttagaatgatgtataggctatcagaattcctacacatgagtggtcctcctgcctcagcttcctaagtagctaggactgtagctacatgccagctactatgttgcctagcaaagagaggatagctaattttttatattataaatcaagacatagtactatgccatttaaaataagaatatagaagctacagagatgactcagaggttaagagcacttactgctcttggagaggacatgagttcaattcccagcacccacatataactccagttgtacgggatcagatgtctttgttcctctgcagtcaccaggtagacatacaagcaaaatattcagacacctttctaaaaaaataaaataaaataaaggtaactattaggagacttaatgtttcaatttagcagaataacagtagtgacttctcccctgaggcctgtgacctctatagccagaggttcaaaatagccattcatagcagcttctactttctgtccttctggttactgtagtcatgatttccttttggttttattttattcttttgattcaaagaataatgtctccgctgagtacatgctaggctagtgttctacactgagctcctcttccagctcttggttatgatttgaggaatgcctgttggtgaggtgtaaagctatgtgggcctcctgtaacccagctggccaaaagatggctgtgtcagactgctctgcagacatcaggttaatagtgtgctttgagaggaatgtacatttggcctatgaccaccactggtcttccatccccaagccactaatctgcagccaggaaacagcgctgacctagttgggtgaggcgcagggttatcctgccagtgggagcatggcatttctggcaagagatttctcttctaactgttggagttgatgccatggcaggttttcctgactcagagagctaagtgttgaacctccatccagctggtgagattatttgttggttttgattatctgtcccagtgagctcctttgctggcacacataatcaaaagcaggctgccgttttccatcttcctaacaaaaaggaattttgcattttgaacttagaatagataaatttttatttggtttatactaagatagtgcttttataggagaggggaggtttgttggattgaattgctttgttgcttaatggtaatgggattcaaacccagggtttcacatgtcctaggcaggtgctttaccttgagctagaccctcagcccccaatcaggagtgctcagggacagccacgtgacctctgccaggtcattctttgctgatctcattgtttctggtcttcaccacagtctcatgagctagctccagtcatctctttgactttggtttgaagaaggtatctgagagttgagtgacttgtctaaggtcacagaggcagaaagtgctaaaactctgactgtgtgggctctggaaactgtgttctttgccgtagatttaactgagttttagtgtagctgctttactatgtaaggatatgaaaacagctgctgtcaagttaaaatggtataaagtgcatgtgttgttgctggggaatgcttaccaagtgaatctattctaaaggaagtttgggatttgttttctttctgtcacttttttgtatccttttagtgaaatatactagtgtatctgtttggtctctgtgtgagtgtgcacgtgtgtgcatgtgtctgggtcagaggtcaatgttaggtattttgcaccattgctcctcacctcattttctgagacaggctctctcctaacctgaagcttgtcaagtagactagactggctggccagtaaactcctagaacccttctgtcccctaagctctggggttacagggtgacaccttcaggcctggctttttcatggggtctagggatctcgcccaggttttcaggttggcatcacaaacacattgattattcaccgcagtatctcctcaaccagctacatcttcttctttctatacagccaccatttgtcccttatatttctgttgtacgtctctctacttctcctgtctggaacattgctgctatctgttcaggatttctcatctgtcattccttgctgcctaaagttgatcatacacattgaaccaatttttaaaattaagcttctcaaattgcttgtttaaaccattgtctcttgctatccataagaaattatgacctgcagcccatgtctctgatgctgtgatcctgtctcagccatggggttttggtggcttcattctctccacttttcctgcccttgctaacctatctactttatgatacgtgtgctttctctgtagctcacttgctgcttttgcttatttggtttttgggtgtgtgcatgctgtgtttttgggtgtgtgcatgctgtgttttagttgtctccatgtatgtgtctcatctaccacaaggagtcttacctgctggatcaagaaaggatggcaagtctctggattgctcatatttagcacagatttttttttttttcgagacagggtttctctgtatagccctggctgtcctggaactcactttgtagaccaggctggcctcgaactcagaaatctgcctgcctctgcctcccaaatgctgggattaaaggcgtacaccaccacgcccagctcttagcacagatttttataaatagcatgatgtaaaagcaaatattgagtgaagttttgaagttttaatgccaacacataactccacttctagacttacttaatttcataaattctaagcaaataaaacttactgactttcctattatgtttcacatcttttgctgtacttcattgtaagattgcaaaactgtcagtattaactttaataacttaaaatattttttaaaaataaattctttttggtattccaatctgaaagataaaaaaacctactctacatgaaagtaatgtacctataagtatggattttttaaaaataaaataatatttgagaacttatagcaagttactttatcatattattgtaatatgtaattttgataggataaactgaagatagcattataaatataagaaagaaaagaagctgggtgtggtggcacacacctttaattccagcacttgggaggcagaggtagggggatttctgagttcgaggccagcctggtctacaaaagtgaaaaaaaaaaaaaaaaagaaaagaaatgagtcatctgcttatcttagttgatgaatggaatgtagctggaggtcactcagaatattggtaaatgacaccaaaacactttaaacatgtgtaatactgcgcttaatcgtctgattaatgaaagcatactgcatttgtatagcaaacttgcttcttgtctattgtgtatgaagttgaaaatatgcctttagtttttcttctttttatagtccattttgttaatcttcaactcctttggtttgcttaatatcatagatgcgctgtgatgaatatttttactttaatgtacaaactatccaaaatatgtacagtataagttatttttgctttgaaacatttgagtattgataaggagtttcttcctcaaaccaaatagtaagctactgttcatgttcctacatgtatgtctatctatgcctggtaatgttggcgtgctctgcccacctgtcagtacaggtgctagtgtgtaagctctgaagtctcatgcatgcaggctggcggtcctcttgctgagtctgtccctaaattgtttataaatactattagacagcatgctaatgcctttctagcacttcatattttcttagaaacaaattgttttaacctttaatttggtttctatggcatccaaacaaaactgtaaatctgtctttttaagtaaaaatgtcatatattgatcactgcctgtatctgatcatatctcttaaatgatatattacattgtaaaggaagtgctgttactctttaaaaagaaaaagtctttgcatgaaagtagattatcaatcatttttgtgactcatattcagttgtttcatgttttcaatcagatttctcacgatccatagttacttcatgcatgttcacttgtagttgtgattttttttctttgtcatggaacttaagctagtctacattttctaattgtttttattgtattaagatttttggaagaaatgaaagggaactagttttgagttcaagtgtatatatttaatatgggttcttttcctccctctgtctgcctaaggaaatagagaagttgagactagaactgagcgaaagcgagcagcatgtggaacaggagcagcagaaggcagctcgggccagacaggagtgcctgcgagtcacagagctgctgggcgaggccgagcgccaactgcacctcaccaggtatgccctaatcacgttacacactcagcacccagtgcagcccaccgggctctgccacaggctcccaacagttgttactcttagtcattcaattcacacacagctttcaggcatattacggaaagtggagatgtggcaagcaaaacagccagactcgtgaatgacgagtgtggcagggactcactggtgtattacaaaagcgtttgtctgcagtgctcaaatgtttcagtggttccttatcgatagaagcaaatgacatttctgccactaccaccactaattctatatctaataaaaaatgttgaagaaagaccatgaggaaatatatttatgaaaataagcagattctgtcagtggcgaaagagacaaaaggaagagacatgctaacagcagactgagatggagttgatacaaaaataaggaatgtgtttccgaaggagctgtgaaattagacatgaagctgatcgggacctcttgctttcagaacattatgagcacgtttgctgcagtgaggtttctaattgtaatgctttcatcatgagctatgtgctgtggcgcaaaccatcatcgttgtgaacttcagtaagcatatagatcactcaaaattaaaacaggaccctaggttgtatgcactgtgagtttggtgaattagaaacacatgcacatgcatgtgtgcatacatatgcacacatataaatgtacacagaaagaggaattcagccagagaagcagactcaacactcggaagtcttcttaccatgcgcccagggcagccttcagtttaacgtcaagctctgagcttgttcggttctcagagtgtctcctcgggttttagaaggaaatttgtctacatatacctaagtttatgatatttaatttaatttacaaaataggaaaacactagtcttccgattacaatcctatgttgaatttaaactatgaaaggggaatgatcccttctgcattaaatatgacaatgtaattctgagcacggtctgatgacagatggagaaacgcactactccaacagcctgcatttggagaaaaaaatatcctagaggttggtgaacctcccaaagttttgggttagtgctaagatgcctccagttctgttaaaatcaaactttgttaaaaacattttgttatgataatcttccaaatggtttgacaccttctgatttaagcagcgagagaggagagagcaaaagggaagagagaaaagaaagcacttagacatgtatgatcccaggggaaaaccccaccagatgaaacacttttatgaggaaaaatgcttaatattgcagaataatagctgctcttttagtgcacattcaaagcgttgtcactgtggcactgagaacacacgattagcccagttcctgtggctatttactcctacgaatgtgaaactttagtttcatcgtgataatgttgctagttttcctttcctgtcagacttctattgagaagcaaccatttgtgtgctaagcactactaagctacagaagtgggaagcatttaatgtcttggtgtgacctagctctggtgaataaatattaatgctgtttttgcccctttgcattctctcttgttcggagttaatttctggagtcaaagtctgtagagttcccctgcactgtctgtctgtactgcttgacaagaccaactcccgccaggagagtgtattgagatgccgtcactgctgcagtgcacgcgtgctaactatgtcctttgttcctaagagaaaagactgtgcctgcttccctgggaagccttttctgcagtggttcacttgcacaaatgctacaaaaatgcaagcccactttctagaactaaagcttagttgactatttttaagtgtagtacttttcataagcattttatgcttcatttatgttcatgtttaatttaaaaaatccaaaatcataaatttaaagatgacaattaaaactccagggaacaagacacatcactcttttatactgaaattcaaacttagctgttggtctgagtttcatatatatacacacagtttttatccctgccattccttcattctttatccatttggtctacccaggagtgtaaatgggaatgggacatctttctttcattttagtgtaggtcggcagctgaagtccagaaccactctgcaagtaagcattccccattcactctccaacattctgagtgatacattctagccaaatcttaaaaataaatatgaagacatgttataagatgctgatgaaatattgagtcaaatctatagcatcttgactgccatcctgctctctaagctgtccattggaccgaccatcaccaaggtccactcactcagtgtggatagtagctcattctggcagactctggccttcccactcactgctgatttccagtcagatgcagccagatgcagggaccctaacagtggtgggctctcttcttctttcacaactctctacaagtaaacacctcagaggcttcctttagcctaactctagccttatcttcttttcagcatctccctgaatcctaatttccctgctgcagccttgcagtgactccttgtagaacagagctcttttctcttgatttctccatcccccttgagcataatctcttctaagggttaagagtatattcattttagtttctgtttggtgtcatgattcccataatagctttagaataaagttaacaccagagactggcactcactgagcaccaatgctttgctccaggaactggccagaaggccagctatgctgtccttgtgggaacttcattagatatagactcctgttttcccagtttatggagaaataaaatgagtcatctaaggtcattcaactgatatgttatagaaacagattttgaaccccaggaacttgcctgccaagctaatcacttattcattaggctgtaagtctatgtaaattactagggaaacggataaatgtgattgttcccaaaaagacaactgagaaaaacagtaatgctaatttgtaatagaaataagtgtttagggctggtgagatggctcagcggttaagagcaccaactgctcttctgatggccctgagttcaaatcccagaaaccacatgatggctcacaaccatccgtaatgaaatctgactccatattctggagtatctgaagacagctacagtgtacttacatataattaataaataaataaataaataaataaataaataaataaataaatatttaaaagaaaaagaaataagtgttcactgatccttcatataccaatatgaatatccattacaacagttgagtcttagggccatttctaatagccctttattggccatttaaattgttcataatgaaactatcatcctcttagacttgatttttaccaagaggaaggagaaaagtcgaaatccctgtacatatttaattttaataaatccaaacatcttttgaactacaagatttgaatccttccatatgattttgtgtgtgtgtgtgtgtgtgtatgtgtcatggtaatttgaaacaaaactctaaaacaaacatttctgaatgtttgtgtgacttactagctactcacagtggtaggtgctcttctacataactatcatacttattaacataccctcttttaagttctgtttcctttcctcacatccgacttggagggaagttcctgtaggaagccttggacctgaattgccctaagtactaatgggagatgtgcccatcataagacctgcaggctcctgattttatcggtgtgtctgtcatgaaagtccttatgtccccttttgcataagtaatttttcaaaggattctcagagcaacagtctaagtgagagactaataaatgatcattttgctctgacctacttttatggcccatatgggaagatctgatctctgacctaaattgatagcaggttgagcttttaaatcattttaaaattgaaaaatgctacagcagagaagtcacaaggctatcctgctgtcatggacaggtttactggaacaaaaggtgattaagaatttctttctagagcattctagaagctgaagtgactgatgttcagcatccagataataactgctacaaatgctttcttgaattagtttgactgctcaatctaccagcaggggtcaagacttgctgagtccttagaaatcctcagaggaagaaactgtgcaagtgcggctggctctcctcgttctaggactggtgactggcaccagcaccactgtggcgccagagcgaaccatccatggcagagctcatttgctcggacttttctctctcacagatcaaatccttcattctgaaactgaagacaaaggagatgcctttgatttcaaatttcaaaagtatgacttcccaaacttcactttaaaaatctccatttccatgattactcccttagaagcgaattgtgtctagatgcacatgcatgcctttgggatatggtgttctgcaggccaggggaaagtcacactttgccaagaggaagttatatcactagggggcaaggtgtgaaggaccctgggtaaaaaaagagcaagtgggtgtctgctccgttgtccctgtcagttttaaaatatgatcacaaatttttttctttgcctgagtagtttggagtgggaagagggagcaaagagaggttctctgttcatgttcatctgagcctgatattgcccattgccaatataaatggaaagaggcgtggccacttccttgaggttgcttggttgtttactttagaaaatgagctctgactgcaagtagcaagaagtcaagagtgcagtgagcatgtgccgcacactgtctggttccgtatagcagtgtctgcttgctgctagtctatgacgtgagaaacataaacactgtgtcagtatagaaaccaatatagctatgtatagacacatttcatttctacttcctccgcccttcttttcttattttgcattagggattgaattccagcctggccttatgcatgctatgaacacagtgaccactgagctacacatacccatagcacctatgtacatttaaatggccacaacaggtaatgagtaagcttttaaaactggagtgggtatcatttttaaacaattgataagcagttcaattaatgagcatatatatttagtgtattgcatttttacaaaactagtgatttacaaatgagcaggagctcaaagaaatctggttgagtacaagaagtttgagatgctctctgtctcagtgctaacatagagctagattgagaacatcccttaatagatgaagaagatgagtcttagaaggggaagcttggaattacaatgaggaagggaaagaaatggagggtttgaagttggccagtagatgccacagtcacacacacacacacacacacacacacacacacacacacacacacacacatgtataaaaaaaatttaaaaacccatagtttagagctaggtatttaagggttttttagggttgtaaaatctaagcttggtggccagaaccaagctctctctttatttccagtccccccacaccaagcgtggcatcaggtgtttaacataaatttacctctgctcttttctattaaggggaaaaaaggaaaaagaatagcatttatcagtttgtttaggtcccagccctgagccccactgggctcatttgaagaagacacttagcatcaatgtatttctttatgttgcatggttaacttcagtttttttcctcttgcgttttattcaagaatttttagcctaaagtttccatttaaaagttaagctcatttccccctcttgtactcctttcatgaataaattaagcagagaacgtgtcaaaaataattttaaatgaatatatgtgcaaccaacatcttcaaggctcaaaatagatggccttggtgctgttataaattgcatcctcttttcctcccccacccagtatcagggaaagtaggctgtcaaggagccaggaaaacagaggcattccattttgctctggtggaccccacactgcctatgcgtggtctctccacctgtctgacaggcgagacaccctggtctcagagtggccctgggcagagagacttgagcgagaggctgccagcaaatgtgtgtctgcaggttctgctcaatgttccctggctcgctgctctcagttctgcaccgcccaaatgtgtgtgcaatgaacatcgacgctgggggtgctctcctctcccctgccacacaggcccacagcctggagcatggcggctgaggcagccaactcatcttctgaagaagcccagaggaaaccaagagcgtattgcccacaccacttgcctgactcaacaacaaggagcatcaagttcaatgaaaatagaaggggaaaggtagcagcatgtggtaaaataatgttcccaagtcagcgtttctaaaagaaagttctgtcctcccatactactgtaagatccatggagggaagggaacaagtcattggcttaatggtgtttaatttcttctcacccacctcctccctcctccatggctttgtttagtaggtcagttgttagatagcactccttttttatttaataaccacgtgcttattacacagtgagtcattgattgataaatccaagacatgaagtttattaagactcttaagatggtttaagagactgggaaatgcttcattctcctctgtgacctgacacagactgaagtcagcctcatggggaacacactgctcacagttacaccatataagcccgcaattggggttgggggtggaatgcagtcagtttcaggccggagcaagtactaataggttaaagcaacattcgggaagcagcctgtaaggcagacggctagctaagtgaagtctgttccacagtggctccgtgtggcctccagcatgcttccatcacctcggagagaactgagtctctttctcatgtcctggagtttaccaggaaagaaaaatgggttgcttgggttttgaggtcgaggggggattccttctgcagaaaaggtactcttaaaaagtcagccttgaaaacattgttgtctttaccggagcctgtttctgactaaaagatttacccaaagaatggacccagaggtagaaggggaattttatatgactgcacttctacttggacatgacatctaaaaacaaagtaccatgtccctagtgggtaagcaggttgcccttgcctgccttctggaagctgactcagtttgcttcagcaggctggctctccttgatttagacacatccttgttctgtcaactgcccttcattttctagaaatcatatctgagtcttgatgaggatgcatggatatgtaaaatcatgttaacacaaagttctgtaaattagagagaggggctgtgcttctatgcttctgcttgttcagagacttcaatgctttaaaacgaattcatataaaaagatgatgatgatggtaatcagccgtcacaatgttcagtctagaaaacttgaggctagttgagggcatgatccattactctaggtagcccttgttggcaaggttatagcgttgacaaattaaggctacagagagtactccctcttttctaactttagtctttgtctttagagggaaagccatcctttccttcctgatattgtcctttgctaatggcagcagcgttgcagcccagggctccttaagttctcctgtgagcactgctggcacttgggttctttctctccctgaaagaagacatctattcagaatccttagtggttgaattggtcagcaatgtttcagccgagaaaggatgataatcctattaaggaacaatgaaatccatctacaacaaaaagaaagcccatgtcagaactatagaggaacccaaattttgatcctgcacccaggctgactttcacaaaaaaattatctgtaaaagtagagggagtcacggtgctggagacgactcctagcactaaaaacatcttagatgttgctttatgtgcttgctttccattagagtcaggaatggtccgactctgttgctgtgattttgtcaacatttatcctatctgtctttcatatacaaaggcttagggatgccagaaaacaaactgttaacggagaattaacttctttggcatgctttcatacttatcttccaaattaaagaaaatgaaatgggcagaaacagagtgtagattacctcctttttgtcaaaaatggtgggaatttgaaaattaataataaaaaagggaacagatgcagtaacatgccagagggagattaatgtggagagtgaaatctgtgagcaacaaaactgaagcaaactgaatcagtgggaggtggttgtacaatcaaaatcaggataaaagagaaattacaaacaaccctgcacttgtcaaagtagtagtaatgaaaccctgactctgccagcagcgagaacctgtgttagcactttggggtaaggatggtagccgggtgccaggtaggagggcagtgttaggttgctgggcagcagccatcttgtgtggaacagatggcactgaaagctggcaggggaggggctccttagcagaactaatcagacagtaacagatagggcagctgggaagactgaccacagagagggagcctgcggggtagctcagtgccacggtgtgtgcagcggtgtgcccattggtctgcgggaagaccttgcaatgcctttcccatcgatggacgcactgaaacttttgttcaaaagggagaattgagttggagtgtctcaaacttgggggtggggttgggtgttggagagagactgggaatggaggaactgcccatctctgaattcgttgcatgagttttcaatgtcagcttctgtggaactttgatttttgcagcatgtgtggctctgccgttctcttctccactgtagcacgccaagtgatcgctctatattttatccacagtttgcagcatcaggactatacataaaattagaaaagacttcctggtatgatttctcacaaatgaaaactaaaagcaaccaggtgatatgtatgtttctccttaataattcttaataacctaattcaagctatggttgacttacagccacttgctcgtcctttttgctccatgtaattgtggactaaacaacaaaatctaagcataatttagagcccaaaccttaaaacaaaaatcaaattactgtgcaaaaatgagaagccaacctgttaaatttaattgtgcattgaagagccataattccagataggtcagcacatttattcaaatgctatgcctttgacaacaagattcaggtctcctacgtctgttttcaaacttgtatcttcctttctcctttttatttttccagaaggtttatagcttggctcaaattattcattttggaggggggagggggaaacattaccaggatttgaaataggtggtataacatagccatatgctatttatgcagcagtttctgcaataaatctaatttggtgctgtcaaaaaatcagacttatttgatatagcggcacattagtaaatgattgtggcagatttaaagttgtcatttagtctcttctaactcttaaacagaatcttgcaaacccgtcttctctctcatcaagtctatgaaaacctccccaggtctttgtcctacagtactgcaatattttcatgtctcaaagcaggttttgcctaaaggtaactgagaaaaaagggtgaaaaatgaatatcctctgttgtcaaaataacattggcagtcagagatcaataaagcggggaaaatgatagtgtctccagcctgtgtagttcttagaaaagcagagcagctaggcaggcacattcagaatgaagagaagctaacatcagttctttattaaggagctgaatgttttaccttgcatcctacacccatatgctgttttaggaaaactggcattaaagatgtgaacgacatcagctccgtcttcacctagtaatgcccttagaaacggcttccctcttctctactgcaacctggcaacataagtgtgctgcctttttttttccctgtagaatttatgtctaaggtgttgttatcaaatgaaactttctccttcctactccttctatttcaaagatataataaacattgcatattaggcaggcaaatattctctgagttcctgagtgagtccttctgcaagaggagccctgacactgctccctcgtctttgccgtatgcttttacagaagggagctgtgtatgggagcacgcatccaagcccctgtgtgtgcctggggtgacgctaccgtggtgctcagcgatctttccctcttgtctctgttcttacctttcaatgtccaaaagaaggttacatgtctttccgaatcagtgttctgaggggcaaggtcccttcacctagtgcaagcagcctctattagaccagcattctgctaatgtttgcttctctcatgtagcacttccaccaccaaggggtccacttaccaacacagtcccaacacagtaccgttccacagcagggacgcaggtgaccaaacgcccatcatacacagctctccctaaagagaaagaatatgcagaaaggtattaagcttgctgggcacagcagttttgaaattttctccacatatagcagaaactatgtagaaattctatttcagagagagaagaaaagagtactcccctttgagctcatagtttcagtacaaaatccacatattaaatattattgcatattacataagaaggatttaaataatatacttagggctagtaatatattgggaattgatgctaaaaatatcccttcagttaaattttaagctgcaaattttgtttggctttgtatttagcaacacaatgattttccttcacatgtccggaaaactgctttgagaaaaatctgttttataaattgtgcatatttaaccaatcaaaaccctgaggtttcaattttaaattccctgttttcttgactggttaaaaactaaaacctgctttcaattttcaaaagaaaaaatttaattctttaatttttaaggaatttataaaaactttgcaaaatgctggttagcatcagcatctgagacctgattaaatctctaggtgaccctgcgcaatcccctgtagccgcctgactgaatgccatcgtgtcatgtttaggtgcgctttctgacaaggctttggttacacacctaaaaacaaaaagcttccccttttaaatttgaattcataaatttgaagagagtcactgcttttttttttcttttctggacaataatagtatctgaagctactaatagcagttaaacctgagagggttctgttcgtcctgtgagaccgagtatccagtcgctgaggataacaatcatccgaccgagtgtccggtccccttcgtttctgtgcttgctgctgttcacagagctgatctgtcaggcagctcacacctccttaggtggattgtatgttcacttggcagcctctattttgttattatttaagcagaaccttacttttaaatgttagatttaaaatgtgcgtggtttgatgtgtatattctgggttataagtttttcaaagcagtgatggagctgtgtgttaatccttagcttaatatcgaaatggtacatgtttgcacattttaagccttttagtgtaaaatttcttaattggaatactttctcccttggctaattcattagtgaaaatatttacccctcgagttaatgctgcacactatggagcagtttttacatagtgtaagcttgtttgtgatattttgatttcactttaaaacttttattttgcttctgatgcatatagttcctactcaatataatgagaagtgcagacacacatgaagaaaatacatatcagctgtctgcttttacaaacgatcattaaaacaccctgtctttactactttaactccaaattattgtcttcccgaacccaaaagtaattttcacaagtgaattacacaacagaacttcctcttctgctggctggcaggagaggacttcagtccctgccgacagttcacttgacaatgaccttgaggggcttcgcttcttgaagaaggaagcagaagcttgcggtaaacaaagttcacttctgacagatggattgaatnnnnnnnnnnnnnnnnnnnnagttcacttctgacagatggattgaatgacagaaaggttgccagtgccagaatagccctggcagaggaggaaatgttcagtggaatccaacaggagaggaggtgtgaacaggtgcagggttgctgacggaaggggagccagatggaaggagccacagccagtttatttaaaggaaaaggcagaaaacattgaaaggctgtgcgatccgtggctaaaagtgttcatagaggaaggtaaaaattcacaaagcaaaactgcacagtggggtagctaacacttagcataatggtagtaatttgtgagtttagtttggaagttgcaattgaaatatattcatcttggctctttgcaccatcaagtatagatatttgaaagttgttgtgttttttttttttttaagtctccaagcttttttaaatccatccattaatttatttttttccagccagaagctccgttgtgataatgctaaaattgtgtcgtcagctaagaaaagaaaaaataaataaataaagtgaaggttaacattccattcaaattcatcttatgatgcttcagttttgttcacatatgggaagcaaatgcatgcagtgttgggtgacatctgtaatatcccaggaatctgcaatgttaggatagactctgtggttgttttctcttgttcggagtctctgttcattttgtgaagtccagcacgttatttcagcgaggagagtgcttgaaaatacacatttgtcagccacaaacacccgagtcagcttgcgctgctggggtggccctggctcccgtggccttcagtagcctgcttacaggcagactcctgcacactggccctggctcccgtggccctcagtggcctgcttacaggcagactcctgcacactgaggtacagcttgaaatagggataaaatatagaggggcaagaagagatggctttcttgttttcttggacaatttaaaattaaactttcttccatcctcattaatagtctttgctcatactgtgcgtgctgctcacgtgagcctttgtctcccacactgtttgaaaagtttcctgtattatgtgaccagtaagaggatgccagtggaggaggagctattgggaaacaatatgaaagatgacaacaaaaatggacggctggtttcaggttttcagaacctactgtctgcacccggtcatagagactagagacaggaaattgttcacagtctgccccagagcagcctgcatcgagcagagtgcatttgactaagtctggaggcctggaacgatttggctttccaagtaatctaggatctacgatacacttttgccagtaaatacgaggaaccgaactttgttaactgaggaagatgtttatttaatcctatttgcttgtagacttgagtgcttttgctctcattttagtctgggtaaggctgtgcacaactacgtctctgagggaagctagaacatgatttcaaattccacttgagatggactacagtccatttgcttctctcgtaacaagctggttttgtcacctttcctatcagagcaactgctgtcttcctctgtcagtgccatagcatggcgcgccttttgaagaaacgactggaatacacagtagcctcgggcttgaaactgcaaacagaaaccaccttacggcaatgagtgctgcactctaacatttagcccatagattgggctaatgcctgtccttcatagacagagcaagtaacttccccagatacataagtgtgtggtacccagggtagttaagccagcacctttcattaggggggtcttgcaaggttttctccagtaaagggataacagttcggttgctgctaactatcattgactgagcacgtgttctattccagctgcacaagccaccacttaaagttttaaaatgaagaagctgcagttcttttccacagatatccgacatggtagtagaaaagtttgtaagtttaagtgtcagtatttatgtccatattagctagaaagcattgttttaatttgtacagttacaaatttagccttaagattaaatgaatgggttaataaaagtatttacctaattcggtacttgggataatagctgagaactgacacgcataaagctaagtggcttgcccgaggccacagttgtttagtggccatctccttagcatgtatactgctcttctcatgttctacaagtcctactcatttggactgattggcagtgcgacttatcaggtaaatatataaaaacgcatacctcatgaaaactttctgttaagtctctacataccccccagaagggagattttaaagatacacaggaaaaactgagttgatttatggtcaggcacctataaagtgtcttatggcaattatttgttctaagtccccgtcattgtatctcagctcctgctcccccccacacacactagtccatttgtgctaggctgagcatagaaaaaggacagtgatgccacccactttgagcttagcatttgggtgaatttaaatacttttcaaatctgattctgagatttaatataataaaccattggtatgaatactttggtctataaacctgtcaacagtctctgcctgaggcttaaaaggatggacagctaaatcgttctctgagatacttcccctacccttcagcacatagctcagcctcccgcctacgtgtgtgcactccacagaagtgcagcatgccatgagtagtaagcaagctcttacaatcagagctttgcatttactgcatgttaattctctgcaaatacaggggaagttgcctataatttatccttattacaaggagactctaccagtgtgttttctataaataaccatcttataaagataatgatgcctgaacctgggactttcaagaggaattcatctgtgtagtcctagctccccaccccctcctttttctgggttttcaaattagatttcttccagaaatccaaccccactgctttttatggaagcttgaaaccattcagtggcttatttgtgttccttcgaggtgcagataagagatttaactaggaagacagaagattaactccccaggcagggtggttcactaaactggctagcaggttcatatctatatggtctctgggagaacttggaaagagttcatttcttactaagaacaaatgatgaagatcgggaacatgattgctggaaattgagtacagaaatccctagaaaactatcagataacctgttatttctcacttaaaaaataaagatgatcaaatgctaaacagtttccaattgtatttcagtttgcatccatgtacagaaataatatcttgctattgttgaataactctgtaatttggtttgtaatttaatattaagtgtgaaggtttattttgagagttacttaaaaccagatttaatttacaaaaaccgaaagggatacctaccattcattgtttcagggtgctactgggatgcagctcacacatctcaggcatgctctctgccacggggttacgtttccaggctcatcttttatctcatatgatgggctacatccttcagccttagctgtcttcactgtcctcgtagagttctcctttctcctccctttaaaaaatggctgacttaagttagaacattttcaaggtttaaaaaaaaaagttgttttaataacacttactttttataaagttttgaattttgaaggtatgtcctcagaaggcatatacatttaatatatcttagcagtactgttctttttatttgtggaaactgggttaaaaatagtgcttgaccaggaggttatccttagatagaccaacatggaacacacatgaaaacaaaaattgcaaataagctacatgtatacttagtagccacatttttaagtaaaagaaagcaggtatcactaattttactggtgtggtttatttaattcactagtcagaacatggtatcatttctgtttgtgatcaggagaacacatgactaaagacacatttgcctctttctcttcctgccctgctctccccatctgagtctctttcacagcacagggccgttccattagctccatctcagatgctcagtagcctcctatactagcatttgctagctgtaaactttgttcctaagcttcaccccatgttgcataacacagatacagttgcattgtatgagcttaaatgccaggttctgatttctagagttacaaggtctcttaataaaatgaagtaatttttgcttttaaaaaatgtgttggctgtagccaagcctcattttgactattcctgttctggtgcgccgtctctttaggggaataagataaaagagcaggcagagcagacagactgtaccagcatgagagcacaaagattctagagcttatccacctttgacatgttggaagttgtagaaaataactttgataactcagatttaggcaccttaaatggtgacccagactggactgtgctaactgcttcatgtggggaccacacagcatcccaatatgacgttgtgaatgagaacctcgaggctgaccaaggtgaagttccgtgttgacatcacactcctgagcagagccagggcttaagcctgggcccaggtgtgacctggagctcaagtgcacatccacggttcaacacaccttccctagggagctgttagctgcagtgcagaaggttttattccctcagactgattatcattgagattattataattactgcttaactttgaatagtcatcttttaagaaataaatacatataatgattgaactaattactatttttgaacttactatgttatcattaaaccaaaaatattgtatgtataatatctggttagttctataaggaaaggtactattaaagatctttttttttttccccattgagtaagatattagacctccttagggcacatagctaacagacaagggattctggtgccaagcctggtagacatcaagatctagtaacttaaattcttcctcctgtgttcaaaggaatgacatagccctacaatgaaagcccaccactgttctcagaggtattatggaatttcagttgcttacattcttcttcttgagacatgcctaacaagtagaaatatagaagagagttggaaaataactttaggatagacaaaggagcaggtcatcaggatggagacagaagaagaatatagcaagagggatgatgtagcaaggtggttagagaaaatggaggaccactgagcccctacagtgtcaagcagaggagactggagaacggaggtcagagctgtcaccagcatggttccgaagccaaacagaaaaagggtcaaatcatgacatcctaattaccgaggcaagagcaccatttacctcattgtgacaatgggcaagtgacaccatgccccccccccccaacagtgaatacctggtaagtgtgttgaaccgtggacgtgcatttgagctccagaagacatctgggcccaggcttaagccctgtctcttctcaggactgtgatgtcaacacagaacttcaccttggtcagcctcggggttctcagtcataacatcatattgaatgagacagtgggaatcggaagacactcagttctgttgcctctcacggaagtgtagtacttctcagctctatagtggtcgagagacacaatgtccccccagcattaaaagtgaacattgaatttggtgtgatttgcttaagaaagcattagaatagtcagtatattttaaacatttctactgggaatggtgcgtgctctcatatctgtgctgatactccaggcattactatcatgtttgatgaataagttattaccaaaatttacttaataatacttcatgctgtttggcatattaatgaatttaatagctaacaaatcttttctatgtggtttcatatcctataaactaatttaaaattttaatagcagagcaggaaacattcagtgctcagtattatttgagtatgatgtacatcctttatttggtgatagaaaaaggtcatgtaatgatcccattagggccttttaaagtttaaagttattcatcagatggattgatacctgaatacattgatattttacagggggaaaaaaagcataaacagaccaaaggtttggacaaatcttaaatggacaaattatggatggaaaataggaattttcgaagctatgaagatgcaaagtcaaaaaatcatctaactttgttatgtagcagcagatttgaattcattttttagtgtggagctctgggtacatggtactttaaaaggccagagatgtgcttcacagttcatggtaactttgtccaacaatcgtttaatgcatcacccacccactcctgccctgggccaatgagagaaagtgaaacagaaaactagtcaagtgcacatttgatggccatttagcctgagtatgtacctgtggttcctaccacatctaaagaagccattgtggaaattgctcttactattgctgtagtaataagtgcttccctgcttctaatgctgtccctcctccatctgttccctcactgccgccagagtgatctttctcaagcacgggtgtgatcacaacactctcctgcttaaaaccctacattggctccctagttccctcgggatgagggccttaaaaatagcttcaagttctggctcctgcttccatctctagtctcatctttcttcagtaatctcccctccaccaactgctcactgctaccccacaacatacacactccagcctccgattgtgccagatgattttggttttccgcaggcacctggctccccctcttccccgggtctgtgcacatgctggccacactctgtagtcactcactggcctgtcacggtgttctccccggcctttgtaagttcaagttctactcagactgagtctttgcttgtataagcctcctggcagtactcctctctgtccctagccactccctcactcctgtttcatggacccgagtaagggagtcgggatctagccctatttcaatgcttactacactctggtagctttgcactttaaagaataaaaacattgtttattttgttgactacgctagaaatccttccagggcatggtctgttctttgtgtactggcacatcttggtacatttgtgtttctcataaagaagttgcctaagtgtttgctggattagcattacactacttgaggaaacactcgttccctgtatataaggcggtgttgtggaatggaaagggcactggacttggaggtggaagacaggtctcctcgctctgctagttaactagttctacaggtggctttgagcacatcctcttgtgaggcggcagaggtggctccatggctaagagagcctgcagctcttgtagatgaccccagttctgttcccagaacccacattggcacttggctcacaactacctgtaactacagcatctgggtagttgattctctcttctggccacaagcaccaacgtacgcatgttatacatgcatacaggtacacataaataaaaaacaaatatttttaaagattatttattcatttatttatttttattagatattttctttatttacatttcaaatgttatcccctttcctagtttcccctctgaaaatcctctatccccaacccctttcccctgctccccaatccacccactcctgatttctggccctggcattcccctacactggggcatagagccttcacaggaccaagggcctctcttcctattgatgaccgactaggccatcatctactacatatgcagctagagccatgagtcccaccgtgtgttttctttgattggtgatttagtcccagggagctgggagggtgggggtactggttagttcatattgttgtttctcctatagagctgcagatcctttcagctccttggatattttctctagcttcttcattgggggccctctgctctgtccagtgaatggctgtgagcctccacttttgtatttatcaggcactggcagagcctctcaggagacagctttatcaggctcctgtcagctagctcttgttggcctccttaatagtgtttgggtttggtagttgtttatgggatggatcctcagatgaggcagtctctggatggtcagtttctgctccacactttgtctctgtaactcctttcatgggtattttgttcttccttctaagaaggatcaaagtagccacactttggtcttccttcttgagtttcatgtgttttgcaaattgtatcttgggtattctgagcttctgggctaatatccacttatcagtgacttcacatcatgtgtgttcctttgtgattgggttacctcacttaggattatatcctccagatccatccatttgtctaagaattttataaattcattgtttttaatagctgcatagtactccattgtgtaaattaccacattttctgtatccattcctctgttgagggacatatggtttctttccagcttctggctatcataaataaggctgctatgaacatagtggaccatgtgtccttattaccagttggagcatnnnnnnnnnnnnnnnnnnnnctttatcaggctcctgtcagctagctcttgttggcctccttaatagtgtttgggtttggtagtgggttatgggatggatcctcagatgaggcagtctctggatggtcagtttctgctccacactttgtctctgtaactcctttcatgggtattttgttcttccttctaagaaggatcaaagtagccacactttggtcttccttcttgagtttcatgtgttttgcaaattgtatcttgggtattctgagcttctgggctaatatccacttatcagtgacttcacatcatgtgtgttcctttgtgattgggttacctcacttaggattatatcctccagatccatccatttgtctaagaattttataaattcattgtttttaatagctgcatagtactccattgtgtaaattaccacattttctgtatccattcctctgttgagggacatatggtttctttccagcttctggctatcataaataaggctgctatgaacatagtggaccatgtgtccttattaccagttggagcatcttctgggtctattcccaggagtggtattgctgggtcttctggtagtactatgtccaattttctgaggaaccgccaaactgattaaagtttatttattattacatgtaagtacattgtagctatctttagactatccgtaagttctgtgactctagagaaccctgactaatacaagtgctaagtacacaacatggtaaatatgactcctttacacatgctgcttttagggttcatctaggagtcgtgtgtaccatagcttcttccattcttgatggggttctaggttctctctggctaggctatctcacacatgtgattcatatagcaggtaataggcatttaggttgtttctagtttttagccagtgtgaatataattactaagaaattccctacaactattgcttgagttttggtttgcagaaccacatagagaaaaatacaagcttttataatgtgaccatcagtaactgtgagaaacccaatgagagaaagcttacaagggggagcggatgtcttcatgaggtaatcaagccactgtgggttagtctccgagctttctacaccttagccttccaactctacctttctcatagactattataacatagaggttattttttgtttgtctttttctagtctgaaatcccttctagagtcaaggcccactaagccttatcttcagtagacatgacgctcagtatatataacgtctttcacgtatagaatgaaaaacacttagtgggtcatttgaacacctgagtagtttttagttaattctttaggttcattgctacattatttctagagtgttataaaatagttttccttgagcaaagatagtttcattnnnnnnnnnnnnnnnnnnnnnnnnnnnnnnnnnnnnnnnnnnnnnnnnnnnnnnnnnnnnnnnnnnnnnnnnnnnnnnnnnnnnnnnnnnnnnnnnnnnnnnnnnnnnnnnnnnnnnnnnnnnnnnnnnnnnnnnnnnnnnnnnnnnnnnnnnnnnnnnnnnnnnnnnnnnnnnnnnnnnnnnnnnnnnnnnnnnnnnnnnnnnnnnnnnnnnnnnnnnnnnnnnnnnnnnnnnnnnnnnnnnnnnnnnnnnnnnnnnnnnnnnnnnnnnnnnnnnnnnnnnnnnnnnnnnnnnnnnnnnnnnnnnnnnnnnnnnnnnnnnnnnnnnnnnnnnnnnnnnnnnnnnnnnnnnnnnnnnnnnnnnnnnnnnnnnnnnnnnnnnnnnnnnnnnnnnnnnnnnnnnnnnnnnnnnnnnnnnnnnnnnnnnnnnnnnnnnnnnnnnnnnnnnnnnnnnnnnnnnnnnnnnnnnnnnnnnnnnnnnnnnnnnnnnnnnnnnnnnnnnnnnnnnnnnnnnnnnnnnnnnnnnnnnnnnnnnnnnnnnnnnnnnnnnnnnnnnnnnnnnnnnnnnnnnnnnnnnnnnnnnnnnnnnnnnnnnngcttatccctcccttcgtttgcctccttttccctccagttctccctcatcctggtcctgcaacttagggcttaaaaacatccagtcattttagcatgccctgcctattttttatgttctgagtcctgctctgggtttagggtagagaaaatttaaagttataaaggaaacagacatttaaactgataacaaatgtatgacatcactatatggcagacacagaacataccaaggtcatccagggcagaatagttgatttagaagaaacaggagaaaaaagggtagaattttaaggtttgcccaagagggctagtgtgtatcatatagggggttggctgggtgggctggggcattccaagaagaggaagaaacatgtgcagtgatccttagccagaaaatacgtggtgtgaagggggaggcaaaagtagcctcgtctgactatccatttgttgcgatatactagtttggaactgagtgtgagacaagaccttggagcacatccagggggtgttgttgttagaagtaccagaagggaccttatttcacatttagcatggacccctgatggttccatttgagtgaggtgtgggtgtgttttcattctggagctttccactacaacactaccacacgcattgaccaatctcagtacaggctttccttatgttgccatataattagaagccagtgaattgaagttccacagcggtacatagactggtagtgatagctttatgaaactgtttatttttagtttggcaaaggctaggcagtaaatatctcaattagtaaactaaagcagcatggatgagaaatgcccacaaggagatcagagttggaaataactgagtcccttaattgaaggaaaccctcatgttgcttctcatagagcttgaagaacccacccagcaagggttcagatgtggcgtgcaatgtgagcacagtgtcagggtgacacgggccgtgctccccctcagcctcagcttgttaggaagttcctctctgggtggggatgtagctgtgtaggtaaagtacctaacctgcacaaagccctggggtgagtgcccggcacttctcaacactggacatgatagtgcatgtgtctaacccagcacttgggggtgggggtggggtagagtcaggaggatcataaatccaaggtactcctcagctacgtagcaagtttgaggccaccctccctccctacaagggatcagtctcaataaaatgaaacaacaaaaagaagttctctcataaagagagccaccaataggatgttgtcctcatgctgcaattctgtcagcatgacccaaaaggaaatttcattatgaatagatgagggaagtagctcctgttcacattgctgtccattcacggtgtgcagcctggtgtatgaaagcacttaatgaaagcaggcatgtggtgctggcctctcaacagcctctgccggtatatttgaagttatatcttacatcttggaagaaaaccagaagtagtctacgaggcttagtttcaaagcaaaatttcccaagactaagaattaagtcatgttcttcctaaaatttcacagtcttagaaaatagcgaccatccggacggtgaaagattggtgatattacaagacagaaagaacagaaagcatgcatgctgtgaagatgcagtcagggctggcaagggctcctcaggaaaaggtgtttgtaaggtgaaagtctaaaggctccagtcctgtccccagccccactgggctaaaggaagaagactagttcctgcgaagtgcatctgtgatcttttcacctgcacactggcatgtgtgagcgcgcacacacacacacacgcacacacacacacacacgcacgcacacgcacacacgcacacgcacacacatacacatacacacacacgcacacacacacgcacgcacacgcgcacacacgcacacgcacacacacacacgcacacacacacacacacatacacacacatacacacacacacatacacgcacacgcacacacacacacacgcacacacacgcacacacacacgcacacacacacacgcacacacacacacacacacgcacacacacacacacacacacacacacacacgcacacacacacacacacatacacacgcacacgcacacacacacacatgcaaataaaaattatcaggtgataaaatacaactgtttcattgttatgattttgtttgaatttttaaaacgtcacccttgagtctgtctggacttgtatgtatgtgctacacagtacagagagagtcctttggattttctctctcctgcaaaatggggagactacagaaagattagctactgctgctttagtgtactacctgtctgcagtctgtggtctgtgggggaatgatggaggtctgtgcacctgcagataacgtctctgtctgtctcctctctgttttgcagactggaaaaagatagcattcagcaaagctttagcaatgaagcaaaggcccaagcccttcaggcccagcagagagaacaggagctgacacagaagatacagcaaatggagacccagcacgacaaaactggtgggtggtagggaaagattagagcctgggcacttgctcacaagccaggcccacgccttactgtgaaatgacatcaggaacacctgtaacctttggctggccgaagggagcagatgctaactgcaccggagattccgaattacatattagttagcgtttaaaagagaaaatgggaagtattgcccactgtctgttgacttgagagtgctgctctcacatctgttgcaccatctggattatgagtttatttacctgtgttcaagaaacgtagagctgagagagaccacaacaaagtagaaaaacaaagggcttgcttttggctgggttttcaggcacacatgttatataaagaaaatagcatcagaagctctgcgggaaatgctctgagcttacagttagagtctcctgaatagcattgaacagttcccacagtacacacattatagctactctaaaagcctaatgagtttgcttcagcatccaaactggagaaaagctttacccattaatcggttcttaattcactgtcgcagctggatgtaattcagtggctccaaattgatatgttcctttatttaatctttgcagcttcgaacatttttagcatttgtatgatttcccccacctcccccaatgcagtcgagagtgatgcttaatcctctgcattcgtcagcttctcagaactgctgttaaaattcactaatacaaggcattgaccacagctggcagcttggcccaaaatcgccatctttcatcacgttggcactattctgcagactgagttggccagtaactctttacctttaatttgaaagtaaaatgcactttgaaaataggcagtttgatgtgtgcagtcagggcgttatgtagttcctttcgcttttgagttgtgtgttcacagacagtgttagtcaaaacaagacagtgtcagccattataattctacaccacatactccacgctgattgtaccattaaaacaaaagtttaattgatcctgtctcttccacaaaaaatgttgcttaattttagagccctgatttattttgctttgtttgctgtatgcttcaccccccccgaacattagtaaaaattgaaaagggaaaattatttacaaatgaatttcacaggatttaatgcatattatatttaaagatatggttaaaaaatgatttcatctattggtaacctgaagttctttaatggatttatttacttataaagtcagctatcctgatgcctcatgtatagagtttctccttagcatttagccagaagaaataaaaaaaatccaaaagattttgttgatttttttttttttaaactaacacaaagaggaattcatcggggaaactgtccttggctattgctggtagaatcctggaccaagagtttgggcaggacctgagagttgggaaaggttttgaccgttaaaatcgtctttaagatcatttattttgcaaatgcacacacaaatcacaccctctttagtctctggccagactgttattgaaacacacactatgaaagtatggtaagatttctaaggacagttgtgtattccacctaatgactggagtgtatacaagctctaagggggtaaaacatgggcagataagaaccatcaagcaccaagtacagtgtagcagagaattcctcggctttaatttcgaattatctggttgtgataatttttgacactgtttatagtaaaattgtcaaaataaaaatataatatcttgcatacttcaaagatataagcatttatgacttcatttgagatatttgacagtttatgagcatgctaaaatgttacacaagctgatatgatcaaaattgttcctggtatacaagtttattatgaaaataaatgtctcacaagactcagtgtcccgccagatgacaagtccttcacttaggacactgacagtgatctggtggatgtaggaagggcagagtgatctgaagcacgttagcaccgtgcatggcaagagttacagagcaaagccacttatgtctcatattggtgggttattgttatttctagaaagtgaacagtatttactgctgacatcccagaacacatttctgacaaaattaaaagaagaatgctgcttgttagccaagaaactggaaaaggtctcactaaagagcaggtaggtgattgggtaacattgtacattgtctttagaatatttttatttgatagctaaaatttggctttaaaattgcatttttactctaccgtaatttattactaaaatgtgccatgcattgatataagttttctgagaaaccaggtatctctgtgtgcatatttttgtgattgtccatctagacaacctttctgtcccaaggagggactccggggccttgtatggtaagcaagcacactgttcccaagctactcccgcaacccaacttagatattttttttcatggttatgtatacgtacttggatttttatagtgtttataacttaaaaccatgaaaatcaggaacaaaggccaagataaccattagcataataaaggatacaaataagtcaagcagttctacaatcttctgttgatataggcgatggcattttagtctatttccaagtttttcaggaacacacaaaagctgtctttaaggccagtcatttgggacactgaggaagaaaacacgcttggtataatacattcttaactttcacagcagcatacaaaagtaattaggttttttttacatatgaataaaaagcataatcatttgaatagcttgtgggtaggagagttagcggcttgacctacgtattgctgttacacagtgtctagagtctttcttacagccatggtgatatttatagttgctgttaaagaaagttcaggcttgctggatagagacacatgcacctgcagtggggaaggcaggagaatttcccgagctgagccgaggagtcctaggccagcctcggcatcagaacaagagtctgcctcttaaaagagaaggagaggagaggtgagcattgcaaaggctagggagggaaaattaacctttaaattcctgtagaaaagtagacattcttgggatgtaattgttagaccgagagctagggctaacctgtaacatgtctctgggcccttgctttccgtctttaatctgcctcccaggatactagtctagtgaacttgaacctccgtacctctcaggcccgactgctactttgtaaacgaaacatgctccttcctatctgacacatagatggcacccaatgcatatttattgaatgagtgataaatgagtgggaaaacaggtgtgctgctatcctccacatgctggtctgactcctggtgccagcctgttcctttgtgggtgacaagcactgttcaggaaagaactctttgggattcagaaggaaccagattagaatcttggtttgtcagtcattttattgtacatgtaaccttgaccatgttgcccggtctccttaaacctcagctttgtaaaagtgcctctaaagtcatgttgcagaatggttataggatttagaagtacatttaatgacaggaatgagaaacacaagtatgcgctcgtatacacacacacacacacacacacacacacacaccctttgacaacctcagggtgttggttgcaggatttacaccacacccaaagccacaaatgacaaatgctcacatttgtaacataaaacaatgtagtagttatatagaacctgttcatattttcctacgtatttcattttttaattttatttcttatttttatggtgttaaaaatgaggcccaggacctaatacttgctagtctagtagcccagcaccgagcaacaccctaaaccctctcccacatagtcgaaattctctctaggttacctatagttgctaatacgatgtaaatctatgagatgagttattaaactgtactgggtggaagctaaccacaggaaaatactcgtgctcagtatagacccagcattccatctgtggttggctgggctgcagaggaacccacagctggggaagacagctgtgagcccccggcacagtgcttgctcaccccacattaaggaacaggggctgatctatcagctcatgcaaacttcactaactgggcaagatatgagtaacattttctaatgggcaaaagtctgtgatgaaaatatgtagggctaaacagaacccaaaaaaggtggcgctcacaacttagtgggtcaggctgtaacacctggttctgagtctgagggattcaaatagtaacatacagaattctcttgagttcttcaaagctcaggccttccaagtagtgaacatgccatgagttatatgtttcaaagttgttctgtgcttcacaagatagcagtagaggcagtgagtggcggttaagggctcgtgtttgtatgctttcgtttctcctcagtcttgccttgttccccccaccccccagttcctaacttcaccctctcctttatgcccatttgacactcgatttggatattatcttctgatgtgaaactacctatacatccccaaaggaccaaagcataatgtaataagacctgtgacgtctgtgtgctctgtgccaagctcttgggttaagtcatttctgatggcctttgaggttaaaagttctcactggggaaattcaggctccagagtaattatttaatccatgtagtggttttggtccaggctattctcaaagtactataataaatctttaataaaaataaaacatggggttttttggttgataataaaaagatatttccccctttccttgctaaaatttctgtaagcctttttcgttattcagaaggccacactaaacaaatggattcagagcattgaaaatgtgctttttcacttacagatctgggcatttgactagaaccatgaagagtcactagagaagtgcagtatgggttcaccaggcccacatagcctgcttctgctcaggctccttcaagtctgctttctgaaaatgtattgtaattgtatgcgtatgtgtgcatgtgcatgcatgtgtgcatgcgtgtggtgtggtgtgtgtgtgtgtgtgtgtgtgtgtgtgtgtgtgtgtgtgtatttctccccaagtaaactgtacatcgcattatgacagtgaagactgtgtctgtctcggaagccttcgtagccatcagcccagtacttagcagtgtgaatactccatactgtgaaagtagtggtgcttgaacccccgggggttaggaatggcatgtcccattttaaaatgaagactgacatcctggttcatatcatgcatcttttatagcttgtttttaaccatcaggcaaaagaattaattccattttgtttttaattggcacaaggcagacattctggctggttttagttgaacataaactttagctacccattccctccacattctggagtacactgagagcttatatacttacaaggttgctgggggagataaatgaatatacttaaatatctttgatacaatttatttttctttgtcaaagtgaaagaagtaagtattctccctagacatttggaaaatccacattaaaatgttacaggcacgtttgcactgtgatctaaaacctgttctgggacaacctagggaattttgggtgctggctagagatgagccggagcccatgccgacagagtcagtgcatgttggagatcaagcatacttcggctaggtctcagcccccctctccctctccttgcctgctagaaggacaggaaggagcagagacctggctctgtgtgattttgcttctcttcgttttcctgtcattgtgacttgctgagttgctaggcctgtggattgatgtctagcactgcccattgtgtattcgtgatttgcgttttgtaattaagaggaacaatgggagtccatggggtctcgttatatataatggttggtttaatttgtttcacttctatcttgttaattgtaaattgatcattaagatttgaattctaatctgtcaccagggttgtgagtattgcgctagagtaatgatcctggttttaatcactgatgatgagaaacaaattttataattttggtacatattgcagttcatatattttaacactgtattttatggtgttataaatattgttaaatgacttttagtgtagttttactatgcggactataatgtataaattatattactgttttggcagcagtaggtatccaactgtgtgagtttaattgaagtaaaagaacacacacccggttgaactatttttttcccttgcatgtttagaggatgttaggttgagctgctacaaaaattatattctacaaaaggaggctgacatcagccttctgttaattgttaccaaaagtcaaaccacagtccaaaagaataaaaaattaaggtgtcatatttttcctttaaaagcaattatcattgtaatctgaattatcgtagtgaaatgtcttccattcatgtaaatgcaattacacactgtagctgctacataaaatgcagggcaagttcatgcttctggaaagacagaaattaccttcgtttctatgaaaatgaattggagtcgttttcccttttctatgggagtgggtgagtgtggctttctgtttctcttttcactttgcaaaccactagttgtatcacgatattgtcagttccacccaaataaaggatgatgtatgtacacttataggaggctgtattgtatgacagaagctggtaggcaagttgccattataaataaagggggaaaaacaaaatatacaacacagaaagcattgttacaatagcacatattatagtcgtctgtacttgaaaaataacatttatatttttgtgcttagtaaagacacctcactgtagggagtcatagagaagaattaggaaacattttcctgtggcattgctctcttaagataattattgctatttttgacatgcttcttgtcaatcatttttttatgtgtgtgtaaatgtgtcatgtaaagtggcttatatcatgataggcacatagtctgtgcagttttacagttgatttctacctgtcccattaataaacacttttcttaattattccagaaagaaaattgccactgcatcatttgtttacataactcactagatgtttatgacatttccaacttttaatgttatagtcataatacaactataactttgtccattttaatgactcttttactagagatgcctaaaagggaattgttacttcaaaagccagacacactttttaaggctactaacgtgtacaattttgccaagtgttgaattaaattctttttcgtacatatgttcctatataaatatgtgacagcaaaaaatgaaatattcaaacaaagagtgtgagcatccgttgcccagtaggtggaactacccctttagagctcgacacttttaaaatacagatccactgtgaagatgataaaatgcagaaaaagatagacaatcaaaagggaaaacttctaacacccagaagttatcagtattaatatttggtgcatgctcaaaatagcttaatcgtaaaatagaattgtattgtacatgctgatatttaatgtttcccctttcttatcaaaatgttatattgtaggtcaataaataagactaataaatagccatattaccaggatcttctctgctgtcatgtaagcaagatagctgatgtcctgatgacaaaattctggataaagtttccacctgttgggtctctctataggtagcactgcagtgaatctaaacataaacatatggcttttcaaacatgtgggttttttaatatgtaagcattttatattttgatattataaagtctacttaataagaatggtgctaatggcaccattcttcttagaagcagcctaagaataagtgcaggttcttttccatgggtttcattattttcctaatttggcttaaggatattttttccttttagcatttatttcagcatatacattaatatagtttggaatactaactatgctagtttttaaataaatacttaattcaaaatattattaaggcttctatattacttttgtattgggtgtgattttgagtggatgctttcttacgaggagaggcaagtgcagagtgagtacgagcttcttggtggtcctgtgcatctctaattgcagcactcaggaggcagaggaaatgagttcaaggccagcctggtctacagaatgagttctaagacaaacaggactacacagagaaaccctgtcttgaaacacatacacacacacacacacacacacacacacacacacacacacacactcacactcacactcacacacagtagggggaggataggggtgtactctgtctcacctgcaaactgtaagaaaggtagacatatagcatagaaagtcagactctaaggagatttttagggaaacagaggtagtttcaaagtctgctgagctgtggaaagagaaggtcctgatctgagcaaggtgcctttaggatgcatgtgagcagcaggagaaaggagtaaggtgttaggtgggcggagtctgccccacccctgtggccgggtgctctttgagatgaacagttggtagggtgagatttcccttagcaaatctaaagccttccctatagagtaaaggacaaaggatggccttgtttaatgaagtactcctttctggggagggaactaattttatgtgaaaagtgttaacttaaaaattactcatgatgtggagaaattaaaactatgatttctaaatggtgagaaagtaggcatgaggaaatgttgtcaatgctggaaatctaaattttaaaatgacacaactcttcttagatatctttcttatctatttttttaagatttatttatttatttatttatttatttatttatttatttatttatttattatatgtgtgtacactgtagctgtcttcagacactccagaagagggcatcagatttttgttacagatggttgtgagccaccatgtggttgctgggatttgaactcaggacctttggaagagcagtcagtgctcttaactgctgagccatctcaccagccctcttatcaatttttaagagttgatttttttttttaagaattgggattgtcacccaagacactgaatgtatagtttatgtcctggaagacctcagccgtcaccacagaaaacatctgttggttctggtttcaatgcaggccaccccccattcctgttatagcactgactgcacagtctaggagcaaggtggaaagagagcaaggaggttacctttcagaatataaacttgtatggtaacaccagttcccctattgtaactagatccccagtgtgacctctcagacctccccagtgctgtaaatggagtctctagggtgtaatatccatccttctattaagcatttcgaattttctgcaatctttttatataaaataactttccttttattactatgtcttaagtatagagtttaagataatactaagatttatacaataaaaatagatactaataaaacaaatctcaactatctactatttctgtgttcctatcttctctagatcgcaaatagttcgacttagtcaagagaagagatacttgtgtgacaagctagagaagttacagaagagaaatgacgaactagaagagcaatgcatccaacatgggagggtgcatgagaccatgaaggaaaggtaaggtgtggggaattgcaggctggtatccagtcgagctgaggtctgaaccccgatggtcataatttacctacatgacacggtaggcattgcctcatgctcctggaactctggcccctgcctaaggtactacctcccacagcccccacaagagaagcatggtcagtagtcacatcagcaatggcccaagcttctgaccttcaggctaaactcctccccagttacctagcaacagtgaagaccataaaaaggggtgttcagccccaccatgctctcttactcttactcgtttgtcctcttacctctcacttctctctcctcttccctttctcttttccttctcctctcctctctcctttctctttctctctagcctccccccctcttcttttctaccttctctttcccctgcatttttataataaagctcttaaaccatacacagtctctgctccttcaagttccgctgcgcactctggtcagtgttgggaacctcttcccctattccctctctcccacaaccctggggcactagcaaggtagccctggggggggggtcccggtcaggggctgccccttttccacccccatcgagtgggtcaggcatgctcacccaggaccctgtggaaaagcatccggcagctctgcctgcatctgcctgcccagagcacaggagctctggcctgacattaggcacctttcccttcccccacttcccctgcctcccccccagggcctcccctttactttgttcccaacagtaaggtggggctgttgacccaggttagttcagttgtatgctgagacaggagagtccctgtggagtaagtagaaattagaattgtcaaagtaaccaggtatatgttcaacacctactacttctctgtagtttgcttctgagatttggggtgttctcactgtatgcagagaaaggcacacattctcttctactattttcaaaagacaatggattgaacttactcaagaacactggtgagacatccctctttaaagtgtacattgacagtattctagcataaccggatttcagatctctcctcctagctcttaggctctaatataccatatataaaataatatgtgcagaagagctgaatctggttaggacctagctgaggctgcactgtgcagaccagtgggctcttttaagcggtgcttctttaagcaagtaggtgagcatgtctgagcttccttgtctacccactacctgggattgataatgcttttatcacaagatggagtaagccactggctcatagaagtcacctacaaggtgccatcagaggtgaccactctcctttccagagacagacattcggttcacagagagtaatggatttgcccaaagttactaatgggatatatggtaaggttcaaactcaaatcttgagtggttgactctaaattccttttccctattgtgtagttttttttcttggcactttattttattgtaataaatattgtcctcttttatgtatatgccatttctaaactctgatcatagagttgcccgcaaataaagtctatgtattttgtagcatcagtgagtagatttctgtagacttggacttgcatactgagcagctgtcagctttctcatggagatgctgtcaaggcttttaagttcccatctctactccatccctcaaagacctgtgccttctctgtctccatttatatacttaggagaaagtggaaatgtatattgatcacactttcttaagcttaagataaagacattggaggagacagtagtgctgtgtgtcaggtcttgatgattccctttgttaagcagagggggatcaaccagaatgtgggctgccatctcctgccagcatgttaaagtacaggtaatgataacaaaatgcaaggaagtccattaacttgcacagtatctccttgaacccacactattctatgttagggaagagcaaattcttggtttttgtaagggtccaaggagtaaatactttagtctgaaagcataccctttaccctggtgtactgcatttaattcataaaatgcatatatgatcactatttcatgtgccttgaggcacacctgcaaagaggctgctattgtttcttcatctccagctgtaaaattaaggtctttagaaagaaaaatgccaactagagggcagagagcaaacgaatgattaatctcatcaacaaatatttattgattggtactctgtgtccatgtgctaccaggtctccatcacaagccaggactaaaacagcaaagcagatatggcactctcttggtggaacttacatgtttttaggaagctgaacttgggagataggtctagactgcagatagaaatttcccttgactttggggggaatgtttgtaaccttggcgatacatgggtcatcaggagagagcaataagaaaaaaggcctactgaccctcaggagcaaccacacttttaaagataaagttaaaagtggacaaaagagatactattgccacaaagcagcctaggcagtacatggaaagggctgttactcatcacagtggtaaaactaccttgggaaagaggaaacattcaaacagatgccagccacacagcaagaaagaaaacatctgttggccttggtaacgcacatattaccagtcaagtcagccagagcaattgttggctgagaataggtgcaggcagtagttgaaaagtaagagtgatttgagaatctgaagtagctatttaccactttttcatgagatgagacacaaggatatatatgcagagcagctagtatatatatgcagggcagctagctcccagagaggtgtgtacaggagacatatacagttcagagcaaagaggtctttgtcttaagttggagtagatgtaaattcattgaatgttattgttataaatatcaataaagtctcagtgaacaagaaagaaaaactttcttcttgagtgactatagtcttgaaagtcaatgttaaaattaatgcttttgtttttgtttttgtttttgttttgtgtttttctgttttaaaccaaatacctagtcttgtgttcctatctagaaaataaacaggatacacagccctgagtatggtgaaggactggggcctggtcaatagagtcctgctgagtgctgtgttctctcatgtagccatactctctctccagctccgagccccctggctctgctgacagtaggacagtcagtgaccctttcccttcagatagtaagtgagcagtttaagcaatgtataatgccattaaagcttctagctgaaacagaggcgctaataaagaatttatatttggtaattgtgtaaaccaggagattatctgtatgaaatactcacattctgttttgctaatggaaactttattcaaaaatataacattagattttatataagccaacattttgattttgtagaagtaaaactattcataattttccaagaaatacttagaatctaaacctgaaattataatctacactgcatcattttcagacaaaagatgaatactataagcatgtcatattataaattcagaaaacaagaattctagaaaaatatatacagctattttaatttgtttgattctatgatatggatttagtttcatcttgacattttgagtatatgttgatgctaaaatgtatttatgttattggccaaacatgacacttttcttatttaattaatatattaagtgattcatatatatagtaacattatttatgaaatagtaaattttaatataaatatccagatttatatatttttaaatgaaatgtttttacttggaagttccctgcttatgttttcatcccatcataagggtttagcaatttctacgaaaattctcaaagctgtgtttctatgaaaagggtttgaaagaagtctgaggatgctgagttagaaaaagaggcaaggttgtaaagtttctgagaatggacagctgtctaaccacaaggcattaagcagggattaattctggacttaaggaaccccttccccaaccctgcaacagcaggaggccctgatggctttactgctgtggtgaaagtgaggtgggccaaggccagatctgtgtacttttcgggtattggggctctcatctgttctgcaccatcttcaccaagggattcacaaggtgactccctcgtgactctactgtgctcactaccatgggtagagagcctaggtaatcactgtagaagaagaaagaaggctttttgattcagggtgttaaaggtttctatccaaagttcattgatccttttgctttgggcctgatgctgccctggtgaaagctgacagagaaaagatgcttacccctaagtggctcttcagtaagcttttcatcattgggacaagatgcctgagaagacagcttatttattttggatcctagtttctgaggcttcagtctgtccctggctaggttcattgctttgggatgaggcaaagctggataccatgagagaaactgtcatctcaggggttaagcagggaaggccagagcctgagtcaaaatatagtcttcaaggacatggccctcagtaacctactctctgtacagaagcccccccccccccatgtaatctggtcagttatgcactaatcctttggtgaggtgtgtgctcgcctttagccagttactttgcagtagaccaccagctagtcgttaagctttcaacacatgagcatctgagaacccttcatatttaaattatagccatgaagaagtcgagatggaagcaaataggaggctgaggatccactgtcctcctgatgggcttgcctcctgtgacctgaagggtctcccaggaggctttgcttcatggagtgccaatctggggagtgaggtttttaacacatattcgagcaaaatagctagttgaaacattgtgagtccacagtactgaatagccgtggcacagctcactgtctcccagaaggtccctctgggctcctcaaaggtttctacaaaccacaggaagaaagtgaaatgaggctctaggggcttggctgccattggccacctgggaaagacatcctgtctctgacttatataaaccaaagtcttaatgtttgatttggggtacaaggtttaaaaatatgtccctatccccgggaaactttcctgaagtaggccttcttagtttagagggatcaccacagctacacctcactgggtagtggtgagcacaagacagaactgaaactctaggcttgtcttatcagttcttctttactgtctaaaagcctattaggtgaacattttaaagggtctgaaaactggtttttatatgacaaaacaacttacttaggatggtaatttgatattctactggtaatccccttgccccacagatctcctgcattaaagtactatcatcagagctatctgatcatctgacttgcagtcttccctgaaaagaacatttaggcacaattcattatcaaggttgtgttgagatcattttgaaaatatatgttcgtacatttctgttcttttttaactatagagttagctttgtcctattttgttagcccattgtggcacagaagcacactcttgcaatagcaatacagtgccttctcagagactacattttggtggctgaggagatggctaagtggacagaaagcacttgcaactcaggggtgaaaaactgaatttgaatccttggaacccatgaaaagccagtgtgaacatcacaggagtcctgctttggggagatgggaggcaaagacagaagcctggaaatccatgggctggctagtctagagcagtggcagacacagactctctgtttcaaacaagggacaaggtgaagtctaacctcagggtggtcctttgacctcacatacactccatgtttgcatgtccatagtcacacacataaatgtagtgcgcacacgcgcgcgcgcacgcacacagtgtatgaatttaattcagaagcagatcgtctatctaatcttctgcgaaagcagatggatgtgtaatctttgccttctatcctgtcaccaccagttttgcacagagaggcctcctttggatatgctgtttgcgagtctgtttttataactgacagcatactattaaatgtgaatttacaaaatgtctgggttattttagatttacatacctttatgttataacatacaattatgtttttaatgaagaaattggtaagtgattaatatgctagatatttggtttttactagtttgtttgttttgggggtttgtttgtttggttggtttttatagattttcgttatcattgattttcatcagctgacaggactgtgtgaattagatctttgcctcacgtatggcctccagggataacaagctgggaatgttgtgtagtagaaaggagggagttgggataatgagaattgcttagaaaacattaccattttcttaaaactgccagaactataaatcagttgtggttcccaaacaatctctctaaaacacattattctgtgcagtaccgaaacacgactaagaagtcaaggggctgtgtgtgacctgaaccatgatggtcgcctcctagcagacaggatgtttccacctttcaggagctaagattttattttgggttaatgaattattttaaacagcacgtgcagtacattcatggaacagggcagatgctgtaatagcagcccacctgcgagcacatgacacatgaaggaacccagcaagagaaacttaggagaacgccaaaggcgtaactacatcatttatactttcgactacaatcagcccaacactcatgggaagagaggctgcttcacttactcaccaggtgtgtcctgagcacttggttctgtcagtcagccttctgtcacataacgaacacccaagacagcccagttactaagaaaaggttcatttggatctgggttgtggaggtccatgaccagtgtaccctctagcttgctgggcaggagctcactgcaggggaaacccatttacacagagtcggaaaagagaagaggaggaggaggagggacctggaatcccacaattctctttaagaacatgccctgcaccagtgatttccccctaggccacacctcctgaaggttccaccatatcccagtagtgtagcctagagagcaagcgtcagtcacatgggtttagcatgggtgtagtgtctgaatagacagcattactagggtgtgcttgaatgcacggctgaccgagcacacatccctgcctagtgaaatgggtaagctccttctggtttaaatgctctcctcctaagacctaacgtggagcagtaaaagggtatacactgtgggtaaggtcaggctctgggcttttctctcattactgtctcaccctaagaattgtggcaaactcttttctctgcaagttttgtcttcatttttttttttttttctgtaaagggctgtcttgtaaggttgtgaaaattgctaaacacaaccagtcaagtctgtagaaccatgatcagcatggaatttacctaacctcttgtagtcagtgcactcattagacctccattatgcacccgtctctcagcggtggactctggggttagcagggactacagagccttccattctagagcgttgtttatttacattatgggttagattggttcttgtgatttagtgtgtgaaccaaaataccatgtttacataatgttatttctatgggaaaatgccttctgaattttgaatgtaacttgtggttttgaacattttagactataacttggagtatagctgttgtgttagtgtgtgaatgtgtgtgcacactccctgtgctcagtgtgtagggctttcagcatataaactggctccaagtgaaatttcaagtggaatatatttacctagttgtttaaaaaaaatttttttgatcatgattggaaattaggtgcactcatttttttttttcttccttgactgtttttaaagaaattttaggttcacaagaaaaagaaaaaaaaaaaaaaaaacaagccaaaaaccaaaaccaaaaggcagattttctctgtgcctgcagtcctccagcatgtgtagacgcttcttgttagagtcaataaaccttcatcagcaggtcctgatcaacgtaacccgttgtttacattagctttgtagttatggggttgtttgtttgtttgttgtttgttttgttttgtttttttgagacagggtttctctgttgccctggctgtcctggaactcactttgtagaccaggctggcctcaaactcagaaatccgcctgcctctgcctcccaagtgctgggattaaaagcgtgtgccaccatgcccggctctatggttttgaattctttaggctgcagagtcctggtacctgtgcaggagtagggagcgagctcctaggagcttattctcccttgcacagaggaccagcctcaggtcaccaggctctgtgacaagcaccttgtgccagcccggtgctctggctccgtctttagtgtgtattctgtctgtgatgtctgtcagtgcagtgtcattgttgtcactgccttataagctccctgtcatggcctatttgtccctcagatgtcccagcttctgagaacttaaatgtctattcttcttatattacagggaaaaatgggtttctgtttttataatggaatttctcccctatagctaatataaactgccttccttgctttggagctcaggctgcctagaattccatattttctgagctcatctctagtcaactcttcttgaaagagttctctctctctctctctctctctctctctctctctcacacacacacacacacacacacacacacacacacgcacacacacacacacacaccttttgagtagattaactctgattagaagtttcattatcctaatttagcacttttcagttaaatgggggttatttgtcatttctgtagccagatttattgctttgcctaacactttttgtaattttaaagattaaatgttaaatgttgacaccttaatctgattccctgcattgaattttcctttgttcttctagtttattaatataccagcatgctaattagcatttctctagcacttaacgctaaaccaaaagtgcatgagatctttaagcggcttctggcctagtcaaagaggcagagtggccataaaggtaagggtccggctacacgagtaaatagaccccagaggctcgagggggtcaaactactacccagtgctgaagagacgagacagtgcttgtgacagaaaagggagacctgctcaggaccgtcaaggatagagcactgtggctttacacatggccggagactggatgaagaagagcagagacgaggaggaggaagagacccaccatcccctcctcttgctctctttacaccagctgcacctcacgttgtctgtcagctcctgaatgcagtcttctattctctcccatattcctacctttatatttctatacagataatttcgggtggccaaccttcaaacttacttctctcttttatagtttagataagagttgttctccacaggtttgtgtgttgaattccttttctgtttgggtttgctgtttgggaatacagtcttctgtgcccctgactagcctgtaacttgtatatagatgcgacaggccttagactggcaacccagtgctaggatcaaaggtgtccacctgtgtgttgaaatcttcaccctagctggtggcactgttcagagaggtgatggcacctggctaggggaagcttacaggcagcattgtccatgttacagctctgagagaaaaggtctccctaatgcaagtgttacagctttgaatagaaaggtgtcctgccagtcaggagccaaggagacctacattgtaacaacagcctcacctgagatttgttgggagagacacaggagagtgattgcctcggcaagaagcagcaaagaactgagtggaaggcagactttaaacagtctttcctgggggtgggtgggacgttccagagtggcctgagattggcaggtttgtgacagctcttgggtctcttactctctagaatggagcttgcccacttgcaccttgagaggtggggtccagcctttatagccattagagtgctctgtgggtggagcctggtgggtggagatattcgggggcagggtgtgaccattagtgcacctacctcaaggggcctacaagaatgcccttgaaacctatacccagacccatcctgtccagtccccctgcctaacccctcctctgtcccctgtctgtcacaaaatgagcagcttaccaagcacttccgctgcaaggacagacattctgcttcaccatggtcctggaatcagtaggcctaggactgaagtgaaagttctggatccagggccaaaatatacaatccacccctttaagttgtttattactttgttacagtactatgactaatgcagtccccccgctcccactctactgatagcccatcaaggatacagttgttctgatggtgtggggtttgctttgctttgctttgctttgcctacctttgttttattagaccttccgtttgactctcatttggcatatggtggagatggggaaaataggattttctgtggcctacttagtgacagatgtaatgtatactggggtagtaataagtctttagaaacacaagccactttgcatttcatttctagcttaaaattgacagtgatagatgtatttatgtcacagaaatatgaaactttgaatcaggactccttcccaccccccacctcccaagagcctgtgctttcatatttgtcactgtaccacaggcaggtggctgcttctccacctccgtcagtgactaggaccacaggctggaggaggtcccatctcctgtagacatcattttgctttccaccatattcttggaaaggccctgctcattctctggaagtaaaccccattcttgtgagggactagcataggaaggaattcttaagagaactcatgactgggtgtaggctcctcctgtcctcttgtgtcaggagttgctgagcctctagccacactgtaagatggtcactgaaatcttcactgttctcctcacacccccttcatacgctctactgaagaacagcccaattgccttgtctttgtccagggaaacaggtcacccagacattcctctgtgtgtgtttctcatcccctacccttgttcttctttgccagcagagctgtgtcctcccttggttgtgagcatttctgctgttgtgtctgcttcttccattctgttttgttttattttgtttgtttgtttgtctgtttgtttgttttggaatctttgtgtttgtctctcaattccaagaaagcctgagtactacactcctgtcctgagacttccctccatgcaggctgtgcaagaagacccaggcagaccgctctcctttccctctgaccttggaccaatccgtactgaattgtaatgcttcattctagttcattccctccattcttagcttaagttcattgcaagaactcatgccttctctggtattgcagcaagctatatgaaggcagtgaccttggatagggaggagccagccattgtcctggataacaaccttgtgatctttcaggcccgatgaacttttaaccttaacttccttgtgcttaaagtaatagagactgaatgtcatggagaattgttacagggtaaatgagatcatgtatgaaacatgtttataaactgttcatgctcagagccaggcagttgcctcagtgggtcagaactctttctatacgacctgagttctgatcccagaacccatgtagaaaagtctggtgtgactgcatgtgccagtaatcccagtgctgtgggggatgaggcaggagaattgctggggctcattggcctctagcctaattcccgggtttagagtgggacctgtctcaaaggaacattagactgcacactctagacaaacacaccacctacacaaagcaggacccacacgctttaaaacacaaaagtggtcaataaatatggtccattacagtgctcaactgtttccctgtaagtttcgtggaattgcagttatcccttgaggaggtgagtcctagatagcttcaaggcaaggctggcacttagtgaaaaacctgtaaaatttatttaattgtctgtttgtttatattgaaagtagaaatagagacactcttttaagaaaaggaaagctcttccaagagttaaagtaggctcatgagaagggaaatgtgtactcccaaagcaagaaatcctttggaagtcacctcaggctagttctcttgggctgtggtattgtcctttgtttttagcagttgctgaggccgagagcttgtgcacagtgcctaaagccgcagctaacacgcaatatgtagtctaggaacacaaggttgtctgttgccctggctcacactctggcctcactgtgtgtcctcactgtttcttcagctagtcagtgagctggaggatggctccaggtctcagagtcacctacacaaagctcagcatcagctcctccactcttctgccccatctaagagtcaaattccctactagggacttttcaggccacgtctccttcaagggttccctggcttacagcaagagtcaatgagcttctacaaggacttctagttcctaacggggcatatggtgcctggtggttcaggcagtttctgcaggctctttgcctgcgttctgatcctagcctctaaacctgctgttgagcttgggcagtaacgtttcctccagagaaccagctgcctaagagaagaggaaagaaactctgcaccttttgacctgactgtctggcgtatggaagagaatatatgcttttgttaaataaaatagtaacttatacgttttattttaccattccaacttaatattaagtgattagtgagtaaaggtagcggaagagaagaacagaacatctggatgcccttggcaatgagcaagttcccaggttaggtacctaggactgcaaaagcttcactttctgggacattctaattctaggacacctctgtgggctttgtcacccatttccactaatgtggaagggcagcactggacttctggggcctcctgcagtggagggtatgggcatgggactgtgtgtggccctgatgcagcagtcctccctctgctcaggcagagctgagactgtgtggggccctaggactgaccacagtccccagcgccacgctctccgtgttcctttggtgatgctgaaggagatcaacacctttccagctcctaaaagatgctggctgtgtgcaggtgaagactcgcacttaaggggagcagttcctgctggtggtggagagttatcagattaaagtgtttggcattatgatatcttggacatttctggaccattgtttctgagaaatttaattggtttaaaataaatattatctataagataatttttatgtgaacatggacaggttcactttcttctcatccatgtgagcgaatagcagtttaaaaagcaagtgttttaagacgtttcgtataaatatctaacagcagcattaagtacccttgattcacacttagtttatgcagtgctaggaatgggatccaacccagggcttcctgtgtgctagacaagcacactacatccgcagctcttgatacatagaattttaatcatccatctagttgttaggaaactctgggttctttgagatttatagactgagatatgtaatatagacttcagactttctttgtgttgaagttattttacacaagccaggccagcacttagaagagactagtcttggctctcactggaaatagcttatggcccctagaactgctgaacttggtataggggggaaaaaaagcctcaaattcagctttcttccactatagaactgcatttaaaacagtttaccatcaggagaaatctttagtttttggttaagactcttaaattatattctatacatacatttatatgcatgcctatattaataaggcccattttccttggcaaaagaggtgcttttcaagtctaagataattaagagtttaaattttcaattcctaaaacattacaaatagatgtaaatccatgatgcttgtgtttgggttctgagtcgtgctgtaaaggaaccagtttgtcatattctacccagaggtaatatttacacctacatctacagcattgatgctgaaagtttgtggaagtcatctagacggctgacagtctgaggcagatgtatgaccatagctgtggcatccgtggctataccttaattgtaaaagccatgtgaccatctgagtatcaaaacgctaatgtctgcctacacccctgatcctcagtatgtgacttcatggataccagatgaatgtcaaggagataggtcagacagtcagtatgtgacagaaggctgggatgtgtctgcagcagtttcctgaggtggtcttccctcagctaatcaagtgggctgcagcatccacgcatgttgcgatgccacagggccttctattcctcctcagtcttcaggagacacccctgctcttcatagctaacctgttctgtatgcagcaggcaaggggacagtgctggctgcaggtgctcttctacagatatggctcctgctttttgtttctttctttgtttgtttgtttgttttaaataaattcaaattagaatctccattcacagaactttctaacattaaatgttaaaggtaatttaatcttagagaaaagctccctctcttttcagactgcaagatcgattcttgagaccacgttggtctccctaatttatgtaaatgtttggctgtctacctccacttagagctgttagagtttttgctgatttgcttggcatgtctccaaccaaatagtccattaacattccaatcctttcccaataattgagacaatcaatttacataaaacaaggcacgattataattttatgtacaatttaaattctatagaaaataatcagtgcaataaagagggacacttattttgatgcaaaggggtgtttttatagtcagtattaaacaaatctttgatgttttcagactcctccctgcattctcttgaatggagtgcagctctgttgcagattccaatggaggatcgagtgagggccgtggtgctgcctgcgtggtaaactgtgacttcttctcagagccatttatttaatgcagagtatgggcacagaagatggtagcatgtttgctacttgctccgagctacttcttgtgagacggacaggacagtcagcaaccgcgcgctgagctttgtttgtctttcccagccttagtgaaccggacacagtcatcttcgcctgctgccatggaccagggcttgtatgttgaattctaagaaagaaggtgaagggaatttgaaaactatgtgtaacacggggcagcatcccgtgtagcatgcctttgtgtggaaagccattccagggaaagcctcagaccccagccagaagccttgcaaagcagcctggcaaagctgcggctctgcctcaagctactgtggttcttctcccttctgagtgcttaaagaggctggtgtgtcagtcagcaaatctagaacactgcagaaatattattatgaagaatgcagtaaaaaataatgacaagatagaaaacaaatcctgtcagagaagggatatatttggcctccacttgctgtgtctgtctgtttccacgaatggtccagaatagaaaccggatgtttaaaatcgccctctcttcctctcgcatgctctccccctcctgtctcccttcctcttcagtattagtaggcttactatttttattattttttatttatattcctagttttcaatatttgccatttgtgtggataacacattaatttttaatgaaatattttgagactcttagaatagctgaattataaaagaaacttgaaatgtatatagactccaggcagcatatgaattaatatcccatggggttagtttgcttctgcgtgaatggcaagtggcggtgctggaggatggtgggaggttagatgcagggccgatgtttgtgcagagtccagttggcaatgatgtcagcatagaatgcctttaaggtgctgctttagttggtcactagtgaacgagatgttcacttaatctgctcttaatttcctttctacctaaaaacccatattttaacaagcctcactgctgggcaaagcagttcctgtgaaacttgtatgaaatgctctgttgttatctgtctgtccagattattgtaggcaggccttgtgaggtgttgcttcacactgaacccgacctaacttcagtttgcttctttttgagaactaaagacttgatggaggtttctttggtagcttgttccctctgatccatcaggtctctgtcttctatggctcctggatttgcatcggagcactgtccttgcgagtccagccagggctgtggctgtggctgtggctgtggctgtggctgtgtttgggattcgttttagagtttaaactgagacaagtagtttcattttgttgttgttgggtttttgtttttgttttaattctttcattattattaaacaaaagttttcgtatatcattagagccttaagatataataaagtagattccttttcattctcaaacaagtattttatgttgaaaacttaaatttcattttaatcattttatataggtggctaattttgtattttcttcttaatgaacatttctaaattattttactttcctccactttacttactgtcaataatttttatattctcccctaaatattttttatctactctgtgcctctcttgtgctcctgtctcccacactcactcctcagccctgttctcagtgtatgcacaccgtccatgaggaaacagaggcctgccagggaagtctgttttctgacttctagcctagtgttctctgatgccctcactccctcagctgtgagctctgagggtgcagcggtgctctggactggtgcaaataagcaagagagaagtactgggtgggcaggagtctgtgtaaaacacagagagtcgagacatgtttctctgtacttggataacctgttctaagcacaatgttatttgggttttttttttgtttgtctgtttgtttgtttgcttgcttgttttttttttcagatagaccacacccaaactgcatctttgctggactcaattttgattttcctaaataaactgcagtcacacagacatttggtaagcagcatgtgtggcatctgccatttggtggccctctcaatgcagtcttttgtatttattttgtgcacacctttctttgtgtgtgggatatccagttttgttgaatctttaaaccattcctctttgttttcatagaatcagtattttagcagttatatttctgagttaaataagtatttaattattttaatagaagtagcatcaccacacttgggaagaaacaaagctggttttgagaatagtattactgctgagagcaccagtgccggtccatgcttgacagcagtagccttttcctgaggagtacaggtgtgtgtgacactcctttgagagggatgggaagtgttggctcatctcatcatcagaggaagtggtgacccatttggagcacttctgctgtagtcgaagtgaaagcttaaaacatagtaagacatttgacttctccacaagcacctttgtttcttttttgccccagtacagggaaatgccagggccaggaagtgggagtggtgggtaggggagcagggtgcggggagggtataggggactttcaggataacacttgaaatgtaaatgaagaaaatatctaataaaaaattgaaagaaaaaaaaaagaatatcagcctcatcctgcccagaagctgggccagtggagatatcttacaccaagcgaactccccaccactcaaggaagcatcagcactccatattggttcctactgacctgacacccctaggggtgagagtcataggtgcaggtgtggttggggcagaaatgtaggcgcagaagccatgctgtcactgataggaaattcagctaattttcccataaggccttgggaggataagtttgatagaagaatatactgttgaaaataaagtttttttttatgttcaaatacatcttgttttattttcagttttttttttagcctgataaatacgtgtatatattttttcttttacatctaaatttttttaataaggtattttcttcatttgcatttctaatgctatcccaaaagtcccccataccctccccctcactcccctacccacctactcccacttcttgaccctggcattcccctgtactgaggcatataaagtttgcaatttttacatggatttagattacttcattattttgaaggcggcagggtcttcctaagtagctcttgctgacctggaatttgctgagtagctcaggtttgcttcatcctcaagagatccgcctgcctctcccttcttcatcctcaagagatccgcctgcctctcccttcttcatcctcaagagatccgcctgcctctcccttcttcatcctcaagagatccgcctgcctctcccttcttcatcctcaagagatccgcctgcctctcccttcttcatcctcaagagatccgcctgcctctcccttttgagtactgggatcaaaggcatgtggcaccacattcagccagatcaattattttttaaaataatttattcttttattaagtgtgaatatacttgtagaggtcaaagaacaacttgtgggaattaaatctcaacttccacaattttggtgcctggcatctgactctagttgcctggcttggtggccagagcctttagtcactgaagccaaaaaccttcaacatggattaaagttgattcctggtgtgggaagtatgaagttaattcttacagggcgttaaatcttcttcctgaacgcagaaagaacaagccaggtgtgctgaggggctccaggtgtgcttagaggctccaggtgtgctgaggggctccaggtgtgctgaggggctccaggtgtgctgaggggctccaggtgtgctgagggctccaggtgtgctgagggctccaagtgtgctgaggggctccaagtgtgctgaggggctccaggtgtgctgagggctccaggtgtgctgagggctccaggtgtgctgaggggctccaggtgtgctgaggggctccaggtgtgctgagggctccaggtgtgctgagggctccaggtgtgctgaggggctcctgggtggagacgctccttctacttctcttttaattgatccacctttgagttgaggatgaatggaagcatccacccatttccttccttccttaggttttagtgtttatcattatgataaggacagtacatagctcagtcacttgggaaaaggtgctgtgtctctgactgttccttcgatatacctgctgtagcctgtaggtgtgggacatatttttattgaagacccccagttcttgaaaggtggccttgaaaaacagtgcatattttgatttagaggaatatcatatgcaacatctatctgtaagagaaacaatatatcccgctttatcgcgctctgcttcactcctttgacagagggtctgtcttggaacctagacagcaagccctagagctacctctggcttggatgcccaccattcacagctctggggctataaggtgcttgcagcacagccacaggcccacacccagcttcttactgaggtctggagcctgaagtcaggtccttagacttgcataccaggtgctgtggtcactcatcctcccagggcctcaacggcagcctttctgacatcactgcctgtgctcagcagttggttcaaacggtagtttgatgaaatgtacagggcatcctaactgtcccgaggatgtctgacttgtgctggctgtggtggacacactgacaaattcaacattgagaatttcagcacagggcatctataatgggagagaaacaccatctcaaaaaagccggacaaagagaaagatgtccgactcagcagactaggaactcattaagaatgtgtcctttctgtaccttttgcactctgcctgagttcaggaggccctcactaaatgctgtaacacctatatccactatctatacatcatctttagatgtatagaatggctgggtgtaaagtgtttgccacacaaatgtgaggacctgtttgattcccagcacctacatttgaaaagaagaaaaaaaaaaaaagaaagaaaatccaggcttcgtatttctttcagattatccccataataatccgagggctgagaaggcagagacagggtccctggagcgcgcttgttagccagcctggctgaattaaagcccagctccaaatgacagcctgtgtgtcagaataagatggtgactcctgaagatgatactcaaggctgacctcaggtatctacatgcaccaacactttaccttttatagttttcctcacattatggaaaagcaaaagtgagaaaaaaatacggaacttgctgttcaaaaaatgtgtaacatttgttaaagtttttacaccttttaattataacctcgcattggggcacttgcccagcccacgtgtctttagttactgtcattaaggaatatatacctaaggtttgtatgtgcgcgataatgaacacccagtgggcctcactgagcggcaactgaggctgttgggtgtgatttgatctcattagagcagaaatggcgcctgctgttgacttaggccaggtactagctcagtgtgttagtagttggcccttagtctggaaggttttgtaggtcccatttaatggagctacctactgaggttgatagcagttgcatcaatgactctgacttcaccagtctatgacagtcacttggaagcagtaaagtacttttctagcttttgctttcctcagtggcctgatccactaacacttgatggttaaggtacagattatgacagcttttctcttaaccaactaaaatgggacttttcacaatgctaatgatttctatataagagaaccaacatacagctgaggttggaaacttgtcttctgtcacctgaccatgcagagacgcctttaaaaattgacacttggaaagaggtcccacatttcctattctaaccaaacacacatacttctgtgtctcttgtctttaaagtaatttctgtgcctgagtctctagtgctccctgttgcagtggctaatgttttaggcaatacttctcatttgagttccatatccattatttccttctctcctcttcccccttacaactcctccctatattccttcaaattcatgacctcctcttctgtaattattattgttacacatgcatacatgttatacacatatacatacatatggttacacatacatgcctgtgtgtatatgaaatctacaaaccccaattaggacagttcttttgtttctttggcttttgttttgttttgttttgttttgttttgttggagactgaatctatggagtagccctggctgtccaagaactcactctgtagaccaggttggcttcaaactcaaacagatgcccacttctgcccctgcccctgcctccagtgctggttctgcctctgcctttgcctccacctctgcctccctattgtagtgattttgaagtctttgaatccatgctctcagctagtgttgttttgatgtatgaggtttagttctgactacttcgtctctcacagccatatattggctgtagctcttcatagagagtgaggccttgtgagactctccctctctccctgttggcacaccagggagactgtataggaccatgtctgtgtgactgcactggggcagcgtcctggccatatccagaagacactgtctagcaacttgtccttcatcttgactttgtctggatgcgccccacccttctttcaccacccagctagcacccttcaccctgcacttcaggtagagctgcaccgagttccactgtacacacacaggagctgtcctagtgcctaaagattaaggatggcattctgtgggagaagtataaccacccttcactttggccggttgtactgtttatgaccccaagattgttagttctgaaaagaatattgaaaatctttaaataacatgtttattcataaaaatgccaagcatcaacactcaggaggcaaaggcaggagaatctcttgagttcaaagccagcctggtctatagagagagtttcaggacagccagagcaacagagaaaccctgtctcggacagacagacagacagacagacagacaaagccaaaccaaaccaaaatgtcaagcatcacaacattaattgcatgaattctcttcaatggaatcataaagtgtcaagaaaatgacttgctgaacacaaaagtttttatcatcattagctgccaaacgttcaaaataccaaaatatcaagagggaacagaccagaactagtgtgtgtgtgtgcacacgcaaatgtatgggtgctctgtttttttgcatatacaatatgtaagtagacatagattgtatccaaggtaacatattccttgtgctctagcgtgactgtctcacaggtgtgaactcagcctttgcctcccgctagtgtgtacatggaactcagtgatttctttgttttttccaaagacttgaaatgcacaaggatgctgctgaagcgtgtatgttggaggcactgtaatctggagcacgtgctaccatacgcctatgcaaagggatgttccccactaatgctcagctctgtccaggctgtgcccaccctggaaactcccttctcacctgcctgcccacccttgttcccacgttcctggggaacacaaggtctttgcgccatataattcagagtagcccagctctgcttcagctcttccctcacatctttattcaaacacacatatatgcagtctagtgtgggtctccagtattgcatacagttagcatcgaagcctagtatacccacacaaaaatgcacacatactaaaagaagacttcatgaaatcatactgaattttgtcatggactttgcaatattgatttcctacttttactatttagaaggttgatttttgcctgccaaattaattttgtgacttacttatatgttgtaaccccaagtttgaatatttgtgccaccaagctgtctgcgaactttctgcacagccctttagcaccctgcttctcagatggccaaatgatttcttccaaatgccaggtgaattcacacgcaaatgtatgggtgctccatcttgccacacacacacacacacacacacacacacacacacacactcagaggaatatactgtctgcctctaggacaggaattattggcttgttgtctcccattatactcactaatagtctaggctctctgtgctgaatttgttttttttgcaaaggaaaatgcagacagtaggagcaggctcagtgtgggtgttgctcatctgggaaacagaactggagccctggctttaacatttggctttttagatttatccctagctccaaattctgctgttgctttagagctctatagggtgtttgtttgtttggttggtttttttcctggtttgacctggttcctcacccctccctccttgctctgtttcctcatggctgccaggcacctccataccttcagtgggattcttaatctggaattatagtcaggccttccaccttcatcaaccataggcaaaatgtagaacttagtcatttctggaagcaagcaagtgcatctcagtttgttgttttagacgctccattgtgcaggctggactcgcagtctgatccttcccagccttcaggacattcaggttgaatggagtcagcctgctcactgtgctctctctgtgtgcactggttttactctggaatctaaatgcctcaagttgcagagttcatgtctttctgggtaccgattgcccacagcctagcacagtacattttaaatgggcactgtgaggccaagaaagtatttatcttagtactttaatttttcaaacttgattaaatatcattatgttgctaggtggaacaggaaataataaaaataattctaagactgagaattcaggccagggggtcacagaatttatgagatcagggttcggtttggtgattcagtgggtgtctgtctctgccccacagggcgctctgtggtcacctaagtgcttcagactcagaaacatagactgtgctcagatggctccaggccctctgctaagcctgcgggatctgtgcagcctgggaactcggctctaatgaagcttgtgtgagaagagatggcggcacttgagttttgctctccccttggcatcctgtaatgtggctcattttgttttgaaggtagcttgttccatggaaaccagacagggtgttgttgaaatagtaggctgatgtctcaatgtaacatattggcccactgagatccacaagggtgtgaatcacaaacccgcctctgtacatttctatatagtgtgaatgttcaggatgtgtaagaaaaccctgcgagagagcaggctatctggttctgctatcaatcctgtttggaaatgtgaagttgatagaataactgctgttcctggctaaaaagattcagctacatggaaaaaaaaaggggggggggctttcaaaccaggtgctttagtctctaacccaaagtgcacttggtttgttttctttgggcggtgtgactggcactgtgtatttaaagttcagctttgtgtgtggtattctcctgtgatgatttcaggacataaagtaagatgttcacaaaagccaacctgagaccaatactctgcggcagtttagcggcaaatccccgctctgggtatttaacagtaattgggatctttctattggctttgcacacgctcagattagtagtaaaacctaagcccctttccatttggcaaaggctcacacttgaagcagcacaaactcgattctgattgtgcttttcattcgcacctagctgagattttgcctgatgctttttaaatcctctaatttacatactgtggtaaatttaaaataagaacagatgaaggctgcagagttccccattccactgatgaatatggtattttgcttcagctatctagctgttatatattcagtgacctttaaaacacagaacggaaactcatacagtgtacatggtgggttattagtgttgcctttgttttgaggctgcgactctgagactcgggagccaagcagagcacctgagtactaatgccataggactaagttcagaacttcctgtctgtgcccagtcagccgggcagacaggcctaatccttgcctggtccttctgaagttggggagtgctgtttcaggtcacaacagggtgtcctgtcatacctgcgggtaaggctgtgtcctcaaaaggaccctgtgcttttggtcatgagtctgcagtgctaatgggaggtggcagagcctcattgggaaccttattggacatttggggtgtgcctttggccaggatattggggttcaagctccttcctccaccttttgcttcccaagcagcatgagatgagagggcaggattgagactcaacacaagacctggagactctcacaagacctttctgtctaccgcctgccatctgccactgccacaccaaggctgatggccacagagggaagcaaccacagactgaacccctgaaatccttgaccagaaccaaccttccctccctctaagctgattatctaaaatgttttccacagtgaccagcagagatccggcttaggaagaaagcttagttttgaatggccactgtggatttggctgcagttaaaagcaacaggtcatctcatttagtaataagaagaatattttcctccaaaaaaccaagttgggactcagagaatttaaattattcaataactgagatacactactaggaaactctactgtctagaaacctgcactgcctccttaggaccctgctgggtcccctgcttggtaatgatagctctagaccaggattctttcactctccctgaattttgcacagtgatctatgtggctcttcacaacacatacgttactcaacaaatcaagatttcagtgcacattacaaatgtgctaactgctagctgggtgtccataggaaacttcttatagaccccactgtctcagtgtcacctggactgtcagcttgctagtttccttggggagatgagctggaaaacacttactgccttagtgtcagcatagtctgctgaaagagtccctgtctcaaacaatggcagtctactgtcaaataatacttttaataaccaaaatcagcattaatttcaaatttatatctaatacacagggttaaaattccataatacaggagaaaattttagggcacgttttttaaagagacctacaatagctttggaagaaaggatccttctgttgtctaatgaagggatagaattcctgggaaactgtgagggtctgtttgcctcgccttgaagaattgttcatgtaaccacttggcagcttagcttttctcttcttgatcctgctcatcactctgggagaccagaggctctgaaatgtgatgaatgaccctgattcaaaacgtctgactccaaatgcagctgataggaggccgagctgctgtcatagatctcactgtaagcaaacccaatgtattacatccacatttacaaaatggattagttaagtggtcattcttcacttagcaacctaatttgcaataataattctcccttgtaatgcttataaatgtgagttagtttattagaacgctttgccttggccacatttcaagtgcaaagtccatttataatgttactcaataaaccagtctttccctatttgtccagcgtttactagaaataagtccatgagtcagaaaggtctctacacttcagccatgtatcttgagaatgaggattagcggggccctgatctgtgccaaggggccgagggagctgcggcgcagacattcctccctggctcatgtcatcctagctttccaatctccctacccttcatccacgggatgaaccaggagcgtgccacatggtggaaactccaactccttggctttctctctgggttgacatcagtcacagataaggtctgaggagagttaccaggtcttgtgttgagtctcaatcctgccatgggcagtaggggttcatggtagctctgtgtctggcttgggacaagcaggtaacctgagttcacagagctggtttagtcctcgtgtgaatgctttgggatacttctgaggccagcccagctggagcaggtcactctggaagtaaaggtcacttccttccatccctggaaccagctcccacaagttgtcctctcatctgggccaccatacaagtttaaaaataataactaagtgacatgaaagtggctaatttgcttttccctttttggcaatgggattatactttgttttttctttttactctaaaggcagccttctttccccccccccccgcccgccccccacgctcactgtgatttcctctgactctgtattccgagtatatttaactttgaatgggggagttggctggatgagctggagtttgtcctgaagacctttatgtagatgctgtctttaatagaggtcattgtcatctggctgtcttgtctttacaagtttttaaggctctgtgcattgctctgatgagggaagcgaccaaatctgttttattcaaattaaaaattctttgggagcagattgtcacaaaacacacagtgatgaacttagagaggagccggctgaggaagcataggtgtttgtcacccgtgccacagacacaggtgctacgcacagtaccggcctttagctctttctgggacagattctgggacagatcttactttgtaacaactacttgattgattgctttgtaactttaggtagaaatattataaataaccagaatgagcccgtgtctactctcttgacacactcactgtcatcttcagcaatgaaaggtatcataaccaaaagtgattcactcaggtgtccacgtccttcattggtactaatcaccagcctttcttctaagatctaccacccagtgctggccatttaaaatgcaatatgggaactctgtgtctggtacttggtccgtcacatcctctcatcgacgggcagcacgcctttcagatgacttttcctgacagagtcttacacagatgtgctgatcatgatgctggtggtgctgcgaaggcatggcaccccagtctacttcctcctctgttgtacatgctttcctcttaatgcctggatctgagtccctcagaattgattccaaaaagattatacctgtacgcccatacctgcagcctcaggcaggctttgtatgtttcacataggatagctactgctgtttccaaagcaagaaggtaaagcgtctggccagtattgactttggacactgctaggctggcctatgtgtttgcttctctcttccaataagataataaaatgcagctgcagtgccaaagatacctgtctctgtcacaaatggtcaccaggcactggtgtggatgcagtgaatctgtagattgcttttggcaagatagccatttttacaatgttgatcctgccaatccatgagcatgggagatctttccatcttctgagatcttctttaatttctttcttcagggacttgaagatttatcatacagatctttcacttccttagttagagtcacaccaagatattttatattatttgtgactattgagaagggtgttgtttcccttagatcacaccccagctgtcattttgtgcctaagaccccttagtttgtggccttttttacttgatagggtctcattgtgcagcccaggctggcctcaacctagagatcctactttagcctctgggacccgtcattcatgaactgactttttgattttcttgatttattcagttacatttcttaatttgtactgtggtgacaatgaaaattgtattgctacctagtagaaatgtccttacacaacttaaaataactaacagatttaaagtgtttgttatgtaaaataaaaaaatgacaaaaccaaaatgctgacatttcagatatgcttgtgttaatttaaatctgaggcacattgctggacagaggagaaaagagaaactagtttcaacaagggaataaaggccagggcaattcaagaacggctgcttgcccacagtgaaagccacaaccggcttctgctcagggtcatttcactgtgctctcattactgcgttcccgccgtccgcacacgtccacagcagaggaagctgaggctcagaaaaggggagatgaccccaggagctctgagcactgcaaagtttgtgctcttaacacaagactgtactgtctcctgcatccagctgagatgcaacaaccagagaggtgcagcccgctggaggcctgaggctcctgcacataggacccatttaccttccttcctctcagtggtatctcctccactcagatccacaccctgcatccccaggcagccccacctctccttcccctacttgatggactcccacaagtagcatggtgggcatgccccttctgtccgcagctggtgtttgtggcccttcctgcccagcttcccagcactcttgaagggagcctccatcctcagcaaggcagtgcctgttgggtatttttgcttaattattatacctatttaatgctacttagaacgttgtcagctgttgagaaaaggtaattatcacgagtcaaatgagaaacacttttttggctgccttacggatacacgtttccctggtaccttgatgcataatgaagcctgatagcagaactttgctagtctcttcttcaagccacagctgtttccctgctaaattcatcccatctgtctccccttccgtgaagctgtaggcagtatagcataagtacagaagcagttcagtgctattttggataaacatagctgaaatttgaatctttgccatttgcgatgcacacattttgttttactgctgtaaagagagctgtcaaaatagaagtacatggataatttactaaaatacagtcagatataagggtgatccagaggaaagtacacgggtcactctgacctccccaggacccccgaagctcgtctctgacctccaggtgtggctggggcccgcagcccccaaagtctttgttttaattctacagcctaactctcaggactcagttcctctacctgtttgtgacatgattggcagttcttaagaagctctgcaagccaactttcttatctctatgatcatttgcatcagtaggaaacattctctttcttgctctgcctaccagcattgagctgtgtcatactgttcgggtgtttggaaatgcatagaagtgtttgttagcagtgagacagtcaattcattgttcacacttcccttctccctaggttacccgtgcatctgagtatagctatgcagcattgttctcagccaataacacataatgctttgcaggcaatggacacgctttctatgcgacttccttttttgagttctgagcccctcccggccacctggacccctccctgtcacacgtgtttgtcttttctaagtagttgtgatctctttgaagagcagggctagtctctaataggagcaggcagggcttctttaagcggagggtgcatcccctgagatgattcttagcagagctttagcttcacctcttcgcctctcttcactactggcttcttgcttcatgatctaccatgggaaggcccagaattctcctctttatcacctttacctccccagataaccctcagcatataaatgactgtgtgaggtaacatggacttgagagacagtcaggaaagagaggcccttttgatagaggttatgaagatgaggactctgctagatgattttgcaaatttccagaagtttggctcctactagcagctcttccactaccttggagagagtctagttttgtttgccaccttatctcaatactgtatagagaagacatggaggctgctcagagaacctgtggtgagccagtgaaggtgtgacagtagagtgcacccacgtctggcctttgccttcgagctcccgattttgggtcagtcaggaagcaggagcatctgtattggcttgcacttacccagcgtcagcagcatcataatgctgctggcttcccagctgctgccaaggaaacgattttcctggaaagtccccaagaccctttctgcaccaagacattatcctctttcatccagttttctttccctagtgtttgtttttcctttggggggggggttgttctttggaaggcaaaagtaacagccagccactaatgtaagcaactctattttaactgaacgcagagatggtagtagttctttgaaagcctttgtattaaagaggtctgtaacttttggctatggtgccttgtagtccagagcaagcaggagctttagaagcacagtcaaggccaccccactgctgtcatcaaacatcactttcactcaacactcatgtgtccccagcacttgttgagtacttaagggacctggatagtgctgtctccaaggtgtggttaaaggaggtcacatgttagtgtgaaaagaggcaggcacagtcaacttcccagagagcaaggctgtggaacacagaaggaataggtaagactggaaacaagaaaggctggcaagtccttcctaaggctgtgcagaatgtatggagagcagggtaaagtacttccactcaacatcttcttttgaaaacaaccttagactgaagatccaagactgtttcctctcatggaagtagaacctaccttctggccggctagccatgcgtgtccagttttgtggtgttctatgctttgctgagccttctctcagcccagcttggggcatctctatggatgtctgacctccaaacgaccgagctctcattctacctctgtcgtgcaatctaatcatggtgtgagtccataggcagatttttttctttgtgaagagggacagataaagcgtcatctgtggcaatgtgacttcctaaactctttgtctgaatgccgttgtcatcctctcattgttaggaagccatttgtgtggaagtacacttggccatgtctggtcttatggtacctttccatcaagtaggcgcatacccacatgctctccttcagtcaggtctcttagaagattggccaagtagatgattagcgtgtatttctgtgggaggcaaaggtaactggggtgaatgatggaaataacttattgacaaccttcaatgggaagatgggtaggtgctgtggatcctcttaactcaaaggtattaaatggttgagcaaaaggatactcgtgaactggaacaaaactggttgccaatagctgacatggccctggctaaccgctaatcctcagcgataataatttctacaaattgaagtttaatgtatgtggtagcactggcagaacttttgaattttattattactattagcttaggtatcttctgtgctaactgttcggggcgtttacacccttgtttgcacccttgggacaggccagtgctcctctgtggacgctaacctttgcatctgcctctgctgatagtcacagacagtcacagcttggcaattctgtttagtcaagcaaatgtttataacagcgtttaataaactcatccagcagaaactggatttgaaagagacagaaaccagtaaaaactgtgtctgagattaaccggaatattttgttgggcattcaaggctgtatgacttagttaactggaataccgcagagttactaaaaaaacccaaatacacattattagacatatttatacacactgaactgttttaaaccagttatgttggaataaagacaaaataatactgtgtatttacataacaccataacacctttcattagaaaaatctcaagccttcactaagtaacggagctgtgtggcaccctgcaaggtttgtgggatggaaggtagaacgggagagaacacgctgatggcaggacagggcaggcacacggcagagagctgcagctcctggtggctcaatggccattcaggttcaggttgccgcacagtagggagtacgtggaaagagcgtgtggaggacaggggactgtggacctgtgcgtgtttccagatatgcgcatgttgattctcaacatgaactccatgcatttaccctgagtggaacaggatgagcaagcatagtctcgcactggcctgaccatggtcatttaactcacagatcagctctgtctaggcccaggagaacctggttccttttacattcttttacccagaatggattgaagtgtgacagccagtctttgggaatactggaaaacaggcaggcatttcctagtcattgtcaaaggcagaagtggaccctcctctcttccagggcctgcccccggaggctgctatgcccagcacctcctgtgactggcccaatgctagcagcagcaagtatggagaatgaaggggactgctggaaagtgcctgcctgaggcttagcaccctgcagtgcagagagaagcagggcaaacacagggacaggagctgagcagaggcagtgacaattgaattttgcatttagaatttgaaggtattttggataccattctgttggcttcccaaaactcctgtcctgtaacttcacactgacttggttgtccctgccacagatctatcttcctgagcctctaaggaaacaaaggcacttttacttttgctcacagagaagtctcagttttggcttaacctctccaattttcagataatttaggtgtcacagatatccagagtaggatagctttcagacactataatttgaatgtctctgaaatgtaataaatagagcttcatctgggttttagaaataatgttttctttccaaacagctgtttgtttgcattaacaatttgtgccgtctctagaagacaggcagtgtttctttttatataaaatgccgctctcatctccatcctttgaggcttgttcatcactgttgtgatgttgtattacagtccttgttccatgttcagacacccagcctgacccaggggtctgcagaagagaggtcatttcctggtatggtggccgttgtcttctgctttccccagggctggctcttttactgccattccagttcaattgcgaccatttgcataagcatgtgtatgtacatcccaaatgcagcaggagtaagtattgccctgtctctcattggcagagcaaaggatcatggatcctttttgtggtccagttagcatcaaaggatagcagtaaatgagctatgatgaagctgaagataactaacatttggcacatatcagtatttaatgtgtatagtttcctgtcaaccttgtgagatagatgggggtccttgttactttgaggaaatccaggcacagagaggccactgcaggctacaagtcatttggctttgaactgactacatacagtttgctgtgtaatgcctctgagattcctaaggaagagtacataagagcacttggtctaagtgaggcatggtgatgcacacctttagtgcataccagcactcaggattcagaggcaggtggatctccgtaagttctgggcctccctggcttacatagtgagttccagccagccaggactacatagtctctctctctctctctctctctctctctctctctctctctcacacacacacacacacacacacacacaaacacaaacacacacacgtcatctctttgattcaaatggaggctctccaccctgccacttacatgctgtcacttagaacagaagcccattgtggtccatgctcctctgtgagaatgagcacagcacagaaatactcagcacagtgcctggcttgtgggaagtactcagtcaacagtactctgtgagtcaggatgcagggcattgtaggcaatcactcctcagggtcccatcccaagtgggcaggctggggaagacaagcactaacaggtctgatggggaggaatttcaccctgagcacaccgctagcaacattggaaataaactttggatctcctggaacacggcagggctgctgcagcatgaggatcagttgaagacaaatcattttcaatgtctgcctctggggacagcgtggtgccctccactggacgggtactgtgtagacatcttagagatgagggcacaccctccttcataaagatgcctgcgataacattcctgggttatctacattcttacccttaatatttgaaccccatgggataccttggacttagacagtactaagctccgctgagtgtccagggcacaggccttcctagagtagacaccagagatctgagaatgaccccagagttatttatctgggagataacagccacccatttgtttcagctcctatttgactgttaattggattaatgtctgccatataatcagaaccctggaagatgtaggttctagaggggaaatgaagagaggcttggctgataggcacaggagacacaggaagggctgagaacacacacctaaggcagcttcctgcctctttcctctagaaacaggactgcagtttggaagagaagtacagtggctttatttggagagtgcggtctggcaaggcacatgtatacaccataacccagttgtcaccgtcgcctcaaagacttcatatcagcatctgaacaccaacttcccttgcaaataacttcacttttttaaccagtctttcaagagctaatttttagtgaaagtctattctcatggaaagaaacctctgacaattatagcgatgttaagccaggttccagatatgtaatgacagctttgctggtgtgcgcttaagtgtgggatatgttcacatgcatatgccatgtcctgcgtgcttatatagaactctgctttaatccttaactgtgctgagaacagcatccagcacacaggctaaatgaaagtattcaacatacattgactatagaatgctcaagaattaggtagcacatatggacatttggtaaagaggtgggttttttttttttttgtttttttgggcatatatatatatatatgtatatatatatgtatgtgtgtgtgtgtgtgtgtgtgtatagatttccttatcagatgctttaggttcagtctcatcagatgatgaggtggcaaatgtatgaacaacagagccagggtttttcacagaagtttgacttttaatcctatcttcactttgttattttcattgttagcagtgtggacgtaagagagaaacctagtgttgtggtcaggcctggacgctggctcatttatccatgagataaagacaagatactgcctgtgctccttagcctctgtaaaatgagcatcatggtggcattagtgatgtataacgttaagatcaactgggtagcaaaacacttgagcaccgtggcatacaaccgcaggtcttgttacttgggagactgaagcaggaggattgcttgaaccggggaacttggtaccagcctgaacaacatagtcagactctgttaggaggagaaaagaagaagaaagaagtggagagttttacactgcttatcaccctgtctttgttcctgaatttccgttgccccagttattagatggaagagatgctgccgacctcgcagagctgcttttcggatgaatgggctaatgcgtgtagaaagaactttgtctgtgctcagcagcgcccattacaataacaactgcagcgcctgtaaagtcactcaaggtgctcagtgggcctggcccttgatgtactatctctaattctcctaacagtcctgtagggtaggtagcattgctttagactgtaaagcaagaatcagtcttccaagaatttgcttaggatcatgctcagatttcagttgaggtccatttgattttacctgcaaatctgtcattctgtgtacctacatctccatgagactagtccaaaagagtgctagtagtcagctgtgttcatcatcatcatgggaggaagaatttacttcttgttatctagtttgggttattatattttctttgagtagtatcacatctacttcatgaatttcatggtaagacatatagctttgatgtaatgtgcctaagccatattccttcacagcattaaacatcagctcactaaaaaccactgctctctgtaacatgcagccctaggccgcaaagacatttctaaagatagaaccctcaaccctgtcctcaaggtggctcagccggctgtggctgtgtggctgtgtggctgtgtgtgcagacactgtggctgtgcggctatgcgcatggatgctgcggctgtgtgcatggatgctgcggctgtgtgcacggatgctgctgacttcctgtctcagagctctgcttctcaggccattcctcatgctttacatttcagttacaagaactttttattcctgttgtagattgtaagtaatggatttacagtttggttcccctgtctgcatactggttctagccagttggtgttactgctctctggcccacagtatgggccctatgaacaatgctacctgcataagcagacctagcatcccttgtgagacctgtgttgggccttggagtttggcaacttcctacgtatagatgtttgctaaagacttttttattgatgttgtttccttccctccctccaaacatgagtctcttcctctgtcaaactgaaataaggacctgtctctcgtggtctcgggcgaggcaagggaagacatgcttcagacagcatgcacagcacccaaggcgtgcctctcccttccggtgttctccggtgttctccgttggcctcagcaggatagtcacttccttcctgcctttaccacattcccacagacacgaggaattgcgtgtggttagccaacacaaggtccaaaccaaattacacggaggtcagacacttagtttgctcctcttgtggcactgagacagccccacctgctgagtgccaggcacccagaaacagaggcggtcactgtgcccctcgcctgcacttatcagtactttgttcctaaggctttcatcatggccgtgaatctgtcctacgtatctgtgcagaagaaatctgccagtttccctggtgtctctgaccgtgggcctgatagactattttctcccctctcccccaccctcaactgttcacggttacagagagccaggtttcagtcatcagacagttgaatagactgtctcactgggggccagattccaaggagacagcccatggactcacaggccaggagagccaggattgcaacagtgtcaacagtctctgctcatcacaccaaaaaagccccttgtggagctgcctcattagcatacagccgctatgctagctaacaaagccagctcagggtctgttcctctcagtgtgtctgtcttccttgaccgaaaagaaactactcaagccagggaggaggctcgttggtagaagactgcattgaaagaatcccactaggccattcagaagtggttttaaaataatcaattttttgggagacaagactctatgttttatttttcaaattttgttttaaaatcatcaataggtcaaaaaaagaaaaaaaaaaaaagaaaatcgccatgccccacagttaaaaatggtggagtcccaaataattcctggtcatccccttaaaagccttgttgtgtcagagtgagtaagaggagcctccagccaggcaggggcacagtgagcctcctctcaggctgccttcctagccctcttttgttgggggatggagggaaggagaaaggcagaaacagatgtgctgctagaagatctacaggcttctgccaaccatatggcatcttaaagaaagatggttggagcgtctggattagcaaagagtcggaatggggagccatgtgtcgcgttggtacaggcagttgtttgagctctctctaaatggcttcaggagattgtgtaatggaacaaatggtcctgagagcaggggagcagccttgccgctgctggagaggcaattggccctggggcggcggctgctttcctcccctgcccgcagcatcaagtattcttttaatgttcttcgaactctgagaattgactagaacttttcaactattaattacaaggctgggttctctgggctctaggcccctgtgaactctcctctctgcccccaatttggtaattaattagtcatgttgcagccctgctcccgtgtgctgttcctctgtcctccgcagggctccaggctcagtcctacagttctcagggccttgacaaatgccttttgcaggaaggctgtctaactcccaggggcctgtgtgtccatcctgatcccaggagatagacaaatctgtggaggccatagtgagcacatgagagcataccctcccactgttgtaggtcttccagtctctaccagtgaagtcactgcactgttaggccatacctgccattccctggctcatctgagagctcagatgctattttatagttcagaataagcataaactgagcgctgagacctagggtactggcagtacatggccatcgcaaggcaagcattgtgctctgttgctgagaagaggactttgtacatgcagtaaaatcgccagtggctggaaaagttagttcatagctaactctgaggctcagatgtgacaaaagttggcttatagaaggtcgaatggctgagaacaaccaaggaagcagtgggttgacctgagagaagcattcagcaaatcttcattaacctttgagagctctgagagtgactggtgagtcagctcctggcctttctgagccctgtgggaacagagcataccgaatattgatgccttgcctatcatgtctgaccccagctggacgccctccccacacacagaaccaaggaaagggtagaattgacatagtgagctgaccacttggatcagcacataaagctattcaccgtgcaagcctggtgctctgagttcgatacccatcaaggtagaaggagagaaccaactccataaagttgttttctgaattttcacatatattacacacgcatgcatgcatgcatgcatgcagacagacagacacacacacagacacaggtgcacacacatatcatactcatatgtacacatgcacattaaaataataaaaacatgaaaaaccagagccatgtgaggtgtgtgtctagcacagcttccctcagaacatggaacagccacagtgcgttcttctttgtctgttgtagcaacacacagcctcctgcagaaagaaggtggaagccaggtcctgtgtaactaggttggagtaggagaaaggcggttagagatggcatgtgtctgcagactggcatggtttctggctttgttcttgttaaatggggtcatctagaaatcctgtggagattcttaacaaggacatcttaaataactattggtgtttgtgttgtaaattgtgctcttacacacttgagcacgccagcttctctctctctcttttttttttcctccccaagcccattttttgctaacacattgaaggttaggatattcttactctgtcttgtgaatttgggattcattgggggcctgtatctgtgaaaagcctaattctgattgttattcgccaattagaagaaactgtcactcggatcccattttctttccaagtgtacacagcctggaatttgtcagcctctgnnnnnnnnnnnnnnnnnnnncctctgagtttcttgaaacaatgcaattaaactgtaacatatttcctaacattcttaattaagacagtgactggaaaatgtagattaacagaagttcctgtttttatcaacatattttctgtctttccaccgccctcacatgcccctccccccagcgtcttactttccctgtctgatgtcagtttcggccacgtgtacattatgcgcatggcgctgaagaaaccaagtacaaaattctcttttcattccgagctgcccgccccgcaccacacgcactgtctgttacatgtcgcttcttaggaggctcagctgcgagtttctttctaaacgcaaaatgtttctgaaggaaggagttcaggttgggcagattgtgctagagaaatctcactgtctctgaggggaactgatacgctggctgattgttctgtgcaggctcaaactggcgctgtctgcaaagttcaagagtgtctggaaactgaaatatgagggcagctcaggagatcgagcagacaaagcatttggaggggaatttctaagtagggcttacaagtgaaactctaaagtgtaactttgtagaggggcaaaaatcaagaatgaaggcctgggcataaagcatgcccactggaaatattttcaaggactcacgggtacagttttccagggcacatttgagggttgatcggaaaacccgctgggggggggggtcatccagcaccttttgattgtcacctctttgagtgagttcttaagtcttgccagtttcaattaagtcacaagagaagcttaattacttcatagaaattaaaacgagcggtaatatttctttggcctctctattagccaagatttttttctctttaattaaaaattgggtcgtccatgatcatcaacaaacaatgattcacttatttgtttaccaataaggaattagaattaaagacagcaaatacaaacccacagcacctcttgcatcgccgggaaatcaacctgtttttcacattgcttctcaggagaatgaaattgggccgcgagcatggagttaatgaagctttcacccatctcctccctcaactgccagctcgctttaatcccctccttctgccaaagtccagaggccccgggagcccctgtggagcctccctagccagatgctaggcacccagccggcccctgcaggtgccggccctctcatggtgggcagggggtgctggccaagccaccggtatccagaggcggaacaggcgggcgcgcccccgtggcccatgcggagccctgtggctggctgcacctgcaggaggacaattgcccagcacggggtggccagccgcactggaggctgtcgctgttgtctgggcggggtgcggcctgggttcagagcaggcggtgcaggatctaagtgcacagctgctcctcttctctgaaaactaagacagaagcagtttgttggcagcatccagagggagaaatcaaagtctacctttggtttggctgaaaatgatctccaagggtgagttagtgtattctcggggtcagggagtacgcatagtccctgaccattacctctcaaaatggtgccgggcagccagtgaggagtggccggccgggtgagaaggcgccgtgcacggcctgtacagcggtgttgccttcctgtcctgatctgctgtcaggacccttgtgtctctgcccacaccaaacaaggaaatggcaggtagggggacatgcttagcgattagcacaacccagaacttttgttttgaaaatgcagctcctttggcctctgtctcctaggactgggtacaaggccctttatcttctgcccatcattcagtgcaggggagccttacaaaattagagcgcaaagcccctaggcccctctgagaccatcacggtcacacttggtggtaggaggatttctgagttcgaggccagcctggtctacagagtgagttccaggacagccagggctacacagagaaaccctgcctcaaaaaaccaaaaaaagaaaaaaaaaaaaaaaaaagaaaaaaagagaaaaaagaaaagaaaagaaaagcaaagaaaacaagaaaaagccctgccctctaagggtacattgcctgccctcttaggtgcttcaggcgggaacatgctgctgcggaggataacctgaggtgagacacttgggaagttggttaacttacacgttcttaaagaaaaatgagtaaggtgtgtggagcctcagctggctgccttccactccttaaaataagaacattctgtggtccaagtgttaagtttacccctcacccccacccacagtggcatgtaactgggccggatctgtctgttgcgatgcctgagcccactagaaaccaaatgagccctccagccggtctaatcactctgatctgtcatggaccttctagctggaagagttatgccatcatattatcccaacactcatcaccatgtggaggaccccctttactaaatgatttattactcttagcagaattcctctggctgcagattttatttctgagtcgctctgttcagctcaattggtctccttcagttaccgtggcaaccagcagatggggttctttgacaagggtcagcggggaggctgcctcagtgttagagggaagagaaactaaataaaaagctttcagcactgacaggttctctagcccatagccaggagttgttatcaaattactagcattaaaacctaattaagatgtgtgccagtaggtacaccgtagtgactgaatctggttacttagctgccgtgggctcactcttcctccatcacacctctgtgaccaatttggccaccctaaggatggtccagttggaaggaaatggcggaggccctcacttgacaccctccatgagggctgaggtccctagagcagcaggactttattagaagagaatcttcctcaaacagggcactgtgcctccaagccctggggcagcggctaagcagagcccacacatgatagctgcataccttcctttaagactagtgttggcttaacttgggagagcttcaccaaagtgaaactgagcaccaagtgctccagactggaaaggcagcctgacagtgcagaggttctcttctgtagcaggcagagatgatagctttaggtcagcaaggaaactggtggttactctaggtagacttgtgatctatagcaataatagagtaaggtagttgccagtaagcagttctgtaagggttcacttctctttaggaaacactgcaacatcaaagaggaaaggacagtggggcgtgccattcactgtgtgctcaaaaaagaatcctggatggtagagcagaggacaggaggggtgacatgggacactgaggaaggaagctcacttgagtccagttcagtaccagcctgggctacacagccaatatactaaagaacagaaggttaaagagagaacaaaagcaaagggcctggagaaggtggctctacagtgagagcaccggctgatcccccagagggtcctggtttgatccacagcatccacatggtagctcacagctacctgtctaactccagttcaagggattaactccctctcctggcctctggaggaaccacatcatctccaccagcaaaaacccccatatgtacattaaagtaaggtgggtgggtgattgttttgctctgtgttttcaagacacgggttctctgtgtagccctggttgtcctggaactctgtagacctgactggtcttgaattcagagatctgcctctgcctcctctgcctctgcctctgcctctgcctctgcctctgcctctgcctctgcctctgcctctgcctctgcctctgcctctgcctcccaagtgctgggatgaaatgtgtatgtcaccaccacctggctgcaaagtaactttttaaggagaaagaacaactgtggagaggtgagagggagagaggaaccaggtagagcaggtcttccccacagaactgggatagagggatgtggaattccttggtggtgttcttacaactctttagacgctgtgtgtcacagagtgcagacactgacaggtgatatgagggaggagggtttttcctgcctcagctccagatggccctgagccctgggctcagcactgcagactgcttttacagccgcatcttttcccagccctattgtcttcaagagccatgcttaaccaggaccctgctcttactttaggaagaactagttggcataactcaggctttaagcaagtgagtttctgggttctttaaggttcaaagaaaacaactttgttttttgagacactgaaatggaacctgggtccatgattatgccacaaagtactttgctacccagcagcatccctaatggagaatctgaaatgcttggcctgccacttgtccttgtactgcaatcatccgtccatgaccagatccctaaaggtactggggctcagcctggcaggtagctctaaccgtctgagaaagtgacaaaggagggatgtgcgcccatccctcgatgctctaaagtctctggtggaagcactgttttaggcaggaactccgtggtggagttcagtggcactgttggacgcttaggggacttgtggagtggcagggcacattcaggatgcctgaatacctcccctggtggtgtgctgcttagcaggtgaccgaggaaggctcagtgaagccaccttagcaagcatcctgagagcagtatcgtgtttgcagcttccttccacctcccacccccactgccagcactattctttggtctcagtgattgctactgggactggcctgaaatgatttgctactggtctgccacaaggcaagaactgacatagggtagccagaaaaccacagacattttaaaatgcagctgtgcgcatattgtactgcacaaaaccaccagcatgcaatagattgaaaattgagaaagaattaaaaacagtaccaaatctgttatcctccctgagctagcagaagggcaaagaaggaagtttctcttctttcctcactccagcagccctcagaacctgtgtagccagtgttttctagaatgctgcagagggtcactgtttcaaggctcttgtctaaattcttaggcttagtgttctacagaagacagacaaattgactgactcccccattcctctcatcctccttcgtttctgtctgtcttactgctgggatgtaactcagagcttttagttgatagacagccttttgccactgagccacacccctgaggtctgggttggggctatagttctgtggtagaacacatgcttagtctaaagctagagttctatccgagcacctcagaagatagatagatgatagatagatagatagatagatagatagatagatagatagatgatacatggatggatggatggatggatggatggaggaaggaaggaaggacagatggactttgagtccaacaccataggtccctgtcctaaatgcctccacaggctgtctcactggggcagtcaccttacactgtctggcagaactttcatcataatgggctgaaatatgacttctcaggaacctctcagctccagcatggcatttaccaccatcactgccctcaagaaccctgttctgtctctgtgggcagcagaccaatagagaacttctctgaaaaggaaaggggcaacagttctgggaaggtgtaactctccccagaatcatttaaatcatttttgaaccagggtgggtgtactggctagttttgtgtcaccttgacacggctggagttatcacagagaaaggagcttcagttggggaaatgcctccaggagatccagctgtaaggcattttctcaattagtgatcaaggggaaagaccccttgtgggtgggaccatctctgggctggtagtcttggttctataagagagcaggctgagcaagccaggggaagcaagccagtaaggaacatccctccattgcttctgcatcagctcctgcttcctgacctacttgagttccagtcctgacttccttggtgatgaacagcagtgtgaaagtgtaagctgaataaaccctttcctccccaacttgcttcttggtcctgatgtttgtgcaggaatagaaaccctgactaagacagtgggttttggccaaggacgtttacattgcaaagcagccactgacaacataaaaccctgtgcatgagttcttcatcatgtaatctgtctgaccacattaatgagagggaattatgtaaaatgcagtggcaatttttaagtattggaacaaagtatacaactttaaattagcatggttcagtcgccagaattaattacctcgaacagtgattagggtaattggattttcaaaacttgtactcagtgcagtgttaggattgtgtagctggtgatgtggggggatgggagtgtagcaaacccggtgccgctgtgcttagggaagatggggagctgggaagggaatggctgtctcctcggctgaggcttctccccccacccccaacaggtactgctcgatttgtgcttgatgggctctgtgccccaccctgagcagcttaggtttctgagcacaggtgaacagtgtgcgtgtgcatggctttcagcaggcctgcactctctgcaagctgagtcccatatgcagttcatagtctgcggtaatgcaggctggttgcacacactgttcatagtcttctcctcctggcttttccagggtatggatgcccatgcgccaggtccgatggctgtgcttggaaataaggttggaagtgttacttcggaggacttgaactgagaggaacccagcctgaagtagactagccagtatgaatggattctgaatagtcacccctgcttccacgtctcctgtttattcacctgttgtaagattttcaaatcccagtgatgactgagagtgcttaatttgtatgcagtacttttcctttggaaaggctgagatacccactgtgtgaggagaggggactacgcaggggccagacagtgaaagaccctgttactaggcaagggaatatggccacagagctggagcaataatttccatcaaacagacatgatgtgagtggatcgagaaggaccacggatcctttgggtctagctagtatggagannnnnnnnnnnnnnnnnnnnnnnnnnnnnnnnnnnnnnnnnnnnnnnnnnnnnnnnnnnnnnnnnnnnnnnnnnnnnnnnnnnnnnnnnnnnnnnnnnnnnnnnnnnnnnnnnnnnnnnnnnnnnnnnnnnnnnnnnnnnnnnnnnnnnnnncatcttggctgcaactgctggggactgcaggcactgttgagaactttggctgtggagagtatctgaagaatagaaggaggaggtgtggagtgttacaggatacctaagcgcatatgggcagtggggacagaaggttggaataaagaaggagtgcccaacaaggtgtgggggaggggcagagggatgagcactggggagggcaggagtccagcgagtcacagtgtgactgaggccacttggacaggttgctcagacagaatattaagtgccaaggcacctcagaccattcacttggagccaggggctgaaataaaagaatctgatatggaagggggactcttcattgccatggtgattgctgtcccttttacacttgaaattcccagagatgttttggaagagagcctagtcagaggcatcaagacaggagaggcccagccctgtcctgggagcatgggcttgcaggtctgcagagatttcccaggaatatgggagggaaagacagggagagaggaggagcctatgtagctcctcctatgtagctgtggacactttcctctcttccgctctctcagcactactccttcagtcctctgagcttgcaagtgttgtcctcttccacagcatgcagaggactgagttgtataacaaatgcaagacgctcacaattgcagtcctgcagtgagtgcttcctcaataccagagcctcactgggagcaaggagacctgagcatattttacagttcaaatagttacagttttaagctctatatgctgttcggaaaatgtccttaattttatcagtagactcctctcccagggtaagtgtggtctaagcatcctggtgatatgcttctgagaagacggaggaagatcctgtcagaatctccacagcaaagcggctgtggttgaagaatacttctgaacaaaagacattttactactacaccaaaaactcaacaacaaaacagtcaacagcaaacagaagtcacctccactttgtctggggaaacagcccgtggaatgtgtatagctgacacttcacacgtgcagacatcggtggtgacccgcacagcagggcaggatgcgcctcactgggtacccaagtgttcatttagttttgatacctcagagctcacacaccacatgtagctcccccatctcacatacaacagagagatttaagtgcatggatctgtgcgagttcacagtattccttgcagaaggatgtctgaagccggggacccaagctgccactgttttgcataccctcgtcccagcccactcagctttacagagttgttttgtagggtacacttgctctgtcttaccatgatggctcacatcgtttttcagaaagcacgctttctggtcatgcacctgccttgtggctgagaccattgctgttagttcaaaacagaggtgtttggcccagcatacataggtctcctgtgatcttcatctccattctttgttgtcatggaaagtgttatcccttacacactggaattcctagagatgccttggaagaaagcctgagcgaactgcagcgacacagcatggtcagttgttgtcctgaaatagtcgtcctacacatgcaagtcccaaaggtcctctcgtgccctaggtggcacaccagcccctgcctggtgaaaagaagagtcctgccgagcacgcacctttaatcccagcacttgggaggcagaggcaggtggatttctgattttgaggccagcctggtctacagagtgagttccaggacagccagggctacacagagaaaccctgtctcgaaaaaccaaaaaaaaaaaaaaaaaaaaagaaagaaagaaaaagtgtccttttctcatggaccagccattcattgtgaggacagatgcttcacgggacaaggacaggagtcagccacagttcccaaggtgtcacaaggtccacacattgctaggatgagacgtgggcctagagaagatatactgaactaaggtcttgctctgagagcttgtggctctcctgacagtgtgcagcctgggtatttgtgaagccttgctggaaggggctgccctctacacacatttccacaggcctcaaatcatgacccaccttgttctcatcaccactgaatagcttgaggaggaaagggcggaagccatgagactccatgcgtcagatgatagaactagatgagaactgacactggaaagcagctctgccccttggggagagcagcaggcaggggtgagcctgtgcaagtaccccagtgagaactgagaaaggttggaatctccaaaggccaaggggctttgtttggccctgccagaccagcatcgttcagctcttcatatcacatcctgccagcccatcgactttgagcccatgcctcagtattctcatcttgaaagtgggattatcactcccactcggtggaatgacagagagcactagggttgtacttttgcaaaacactgagcacactggcctgggcagtgtctgctcaatgaatgatgggcatggcacgggcctttccagaccagcactttgccagtttaagcattcctctttatgcctttgtagtagtttggtttttgctcggattcagcataactcatatcttcacaggcaacagaccatgctctgagggcaggaattacctcagtccttgctctagtttggtttagcctgtagcatgactgagcgatggtggagcctttcagtggtggggcttactggaagaaagtcaggtctctggggcacaaggaggaaatgggaccccggccctttgtcttagctagggtttcattgccatgaagagacatggccaaggcaactcttatatagggattgggctggcttatagtttcagagatttagtccattatcatcacagcttgaagacatggtgctggagcaactgagagttctgtatcttgatctgaaggcagcaggagactggatgcatttttcactgggcacagcttgagcatttaagacttcaaaccctatctccacagtgaaacacttcctttaacaaggccatacctcctctaataaggtacttcctaatagccaaaagttcaaacacatggatctgtgggggccaaacctattcaaaactccacattccactccctgtccccaataggtttacagacataaaataatacaaaaggcatttaatccaacttcaaaagtccccatagtctattacagtttcaagaatgtttaaaagtccaaagttcaaagtcttttctaagatgcatacaatctcttaactataattccctataatatcaaaataaaaaacagatcacatacttccaatatacaatggcacaggatatccattaccattccaaactgcagggaagagagcacagtaagcagatactgaaccaaagcaagagcaaacaccagctgggcagactcccaactctgcatctccacgtctgatgtcaacatgctcttgagctctctactctttccacctctgttgactacagcacacttctctctcctgggctgttcccacttcctcttagcagctctccttggcaggtatcccatggctctggcacctttaacatcttggggtctccaaggcaatccaggctttcccttcacactgtcatgcaacagactcctcggcctccatcggggattccctgaccacatacctggtctcagcagctttctttacctgcagagggaaatgaatctttgattctaaagccagaaccatgtggccaaagctgccaagtcagctgcctgctgggctgaaacatggtccccttgttcaattacatctttactagctttctctttgttatggtttccttcactgcctatgcctggctgtcctggaatttgctctgcagaccaggctggccttgaactcagagatctgcttgcttctgtgtgctgggattaaaggagtgcaccaccatacctggacctaagcttttctttaatttcttttcacaagatggaagcttagctgcgtaggatcttgccctgaggtcacctctccctaatttcatttaatatctttagtctgtttatctccctgaacacagcatttagctcaattccactttcgggtgccctttttacccttgaaccatacattttgtattttttttctttctaagcttgctacattccatcaaaatgttcttatacgagtgaactacaggacagaatctatgctaggctcttttgagatctcctttgtcaattcaattaatctaaatctcttcactttagcctcagccagactcttcagataagggcaaaaagcagccatatccctcaccaaaatactacacgaatgatctctaggcagcatactaaagttctttttctctgaaccatcttcaggcaggtcccctcggcagtactgtcctccatgctttgactagtatggccaattaaacccccttaatgcatcccactgctttgctaatcccaaatgcacattcttctaaacaaaagcccggtcagacctgacacagcaatatcccagttccagtaacaacttctgtcttagttagggtttcattgctgtgaagagacagcatgaccaaggcaactcttgtaaatgaaaacattcacttggggctggctgacaggttcagagatttagttatcatcatggtggaaagtatggcagcctgaggagctgaaagctttctacctttatctgaaggcagctgaaggagaatggatgtgtttcatactgggcataacttgggcactgaagatctcaaagccccacctccagagtgacacacttcctctatcaaggccacccctcctaacagtgccactccctgtggccaagcattcaaacacatgagtctgtgggggccaaacctactcaaaccactacacatttctgcttcctggctgctatgaagtgagtggcttccattgccacaagcctgccagggtgctctgcctcaaagcagggtaatcttgatctgaaacctgagaagctgaaagctaaggccaggcactccgcctttccagttgtcatctcagttatttgccacagccagacagagttgagtaacacagtgctggcctcttcactgctggttggctggcttggtgacttagccaactgagtccacagtctctgctgtggacgggcaggacttaactaacccatcacattcagtttttccctctctgaaataggagtggtgactctaaggtacttcagaggattataattgcataatcagtatggagttaaaagcttaggaactcagcaaatggtgactgccagcagctgtcaatttaagtcatcaaaaaaaaaaattagtataatgaccactaccaagaaatttgaaatatagcttatgtgtctatagaacagtccaagaaactgcttctgactgatagtaataacagagtacaggctgggctgggtgatgtttataaaatatcttttaaactagaaaaaaatatctgttctcttggcattcacaatgtatctccagagaacttccatagagtgtatttccttaacagttcttgtctctaaattctgtctttactttttcagtgactgtgaagttggggtgttttaagttactgggtctatgtttgtatttcttgctgaatatggagtgacggtatagagctgtccctagtacagtagggggcatatctttttaaaaggagggaaatcatacctgagaccagcttcatagagtgatcaacggtttgagacagtcaccgagtctggtgcgtggtatgtagctacagcaccagtggagcgcgggccgaaggctcgagagagtgagcctgagagagagacttgggtagaggagggtctccttccagtggggacgggaatcagggtctaactcctctcagcttggtgctacagcaagaagccaagcctcccatgacctgccacccccaccccacgtttacagattgctcataaacatcaccgccccgcttgttcgcagcagcaggaagccaaaagccagtacctcagtaggacttaatccgagggaagctaccttgggattatacagctcaatactagccatggtgtttcttacctgcctgactggaacatggaccagttaattgcttctcagggaaaaacaaaagagctgtcagtagccctgtgggaactacactggtgctccatcagagcaggggttacaaagagagggagtgcatatatatatgtcagcagattgcctaggcaacggtccacaccagcttcatgcaggtctgtctcctctgtagcagggagactgatccccgagaaaaccctgtcctatgacaaggtgtcagagtgcagacatgctggcatcccagtgctgcattggctgtgccttcccccaggaaaacttgagttttccttcccctggggcagaggaagcctgtgctacagacacagcaggaaatgtgtagtgtatccactgtgcagcgtatcagaggaccatggaggcatggggaggacacactcatgcgtggtgtgactgagagcagggagctcacctgctttgcaagaggtggcagtgctgggactctgaagagataactccggccaagtcaagtgtatgcaaagaaaggaagccgggtttggggaacagggtatgccatgcttcagtcagtgtgtgggggctgcctgtgctggatggagcccaccagaagcactcacgacctgaggagagcctgaaatgaggaggcctcaggtcagcagctgcatgcaggcaccagcaggtgtgggagcatttgaaatgatcatggagctcatgacaccctctcctgtggctagggcttgccctgcagtgctgctcctgacctgaggcagaggaagactgcacctctcctcccagagaagagctgggtggcagctaccctctaaatttaacccaaagctcccttccataggcacatgtgctagtgactgcacgggctgtctgtggacagatgaggataatggctggagggaattagcaagtctggggaggaaggcctatcagcagagggacaaatttaggatctttgaagacatctggtcagcaggccgcagcctgtgactgacagggattaataatggaaagcccttagttcagtgtttctggagcctcagccatccacatctagggctgcaatctgcccagtcgcagccgcttccctgtggacagtggaggatttaggccccttattttttctctcttgtgagtctgaggctccagtcttctgtactcaactgtctggagtgttttctagtcagaagtgtgttgaggggctgatgcctcccctgtcatgtgctggaaggtatccagcttaatacgtgctggtcagtggccccagagctatggctaacctattgcaccttggtactctctcaggagcttccagcttcactgtcccacagtggttcctgtttgaaggctttgttcccagtccccagtgctacgtgaaggtgctggaactttaagaggagcctagtaggaggaagttgggttattaggggtttgatcttgaatttagtcctgagacattggcttcctctctccatatcctatcctccttgctgtgaggactttctttaccacaaatgcctaaacaaggaacacggccttgccacagacccaagcaaagtgctacagctaaggagtcaggggctcaatgtagttagccagtcacgggcagaaactcatgaacacataagccaaagtaagccatttcttccccaagtattttgtcatagcattggaacgtcaacacatataaccgatggagctaacacctgtcactgtcctctctgctctccgaagcaaccagctctcagaactcatctcagattccttttctgcagactcaggcagctggataagcacggccaggctacagcgcagcagctggtgcagttgcttaacaagcagaatcagcttctcctggagcgacagaacctgtctgaggaagtggcccggctgcgagcgcaggtagggtgggaacctgtctgaggaagtggcccggctgcgagcgcaggtagggtgggaacacacacagggacctctgtgggccaggctgagggcagccgtgggccgtgtgggagcacgaaaagcccactatagctcaagggggcccagggctgcatggcaacacagattctctccttccccctttctaggctgcagtgtcacaggcccaaatccctaagaatcacataggtcaggtcataagctgggagagttatgccaagcatcagactcaggcacatggatcaacccaggcataccagaggcagccacaccatgcaggaacactggtggggaagactagcgggaaagaggaagagcagtgctcaggcccaacatgtggaggaggcagctgtgaactactactgaggactgaaggactttaacagtagaagaaaggggtgctcgaagatgggaaggtctcatgagagtaatcagatgacttagcccaaataagtatctatctaaaatatgtgctcactctgtccagttaagcaagccagcaaggctgatattattgtctccattttgcagatagggaaactgaggctcaaacaagcatattcagctagcaaataggggcacagcaaatggaacctaagtctgactccagagcccaagctgtccccattcaggttagataatggcggaaaagagcccaggtgagttggacgggtggcacaaactactgttcttctcagcaacttctcctcacatcagagaggctctgggggttttgccccattaagcaatttgtgaagataaggatgtatacgggtgcttgcagtggttagtggggaagcctctggaagtgaaaggaaaaaagaccatttcttattctccattcgaaaggaccttgagctgacaatcttgacctgccttgaactctgcctattcagtcctgtaaattgcttcaagttcacagttgtgaaagatccaaactggacactgggcagagggctcacacaatggtagaagtatgcactggagggctagagggcacaggtcagcagggtctgacaatacactgaccactatctggaatgtgtgtaaaacacccagttgtggtggctcccgacactccaggcatgtctggaagcagaacccaggcacctccatttatacgctattggggtaatttgtaaagacagaaagaacctcttagtttggaattgtagccagaaacaactccgtttgaaaaccttggccaaggcatccatggctctcctgagcttctgtcctcatctgctgcatgagaattaagagaactgggcatgttagggtagtggtttgctcagtgggatcttaggaacttggtagcctgaagtgccccatacttgaggtcactctctccccttcctgagaagttcccatggagccagcagtgacaccaccatctctactgtgctcagggctcagtgcagagtccatctcctagaggaggaactggattttggtcataacccaggtctgtgggcaggtccaagggagatttggttcatcaaagtccaaagtcaccagagccacctttggtaactaggctattgtgacatatgatggactgggatctatggcatggtgagctttgcctttggactaatcaccaccctttttttatggcacacacagatcttaacatggaacacgtatttttagaagccttttcctgagttttaaaagcttgagaatttccaaattcactgcacttaaaagaatattgcaggaaaaaggtcttcctttgccagtggcaacacaaatgacttgtctaccccttgctgtctggagcatctctgatggggcttttttatattgaaattctaccctgcgtgttattttaagatgaccacggcgaaagaaatttggcagaggtaatggctccctgttgcaaatgctgggagcagttggaggttttgcaagctctttgcacagtctctaacccagtccactctggcacaagtgttacactggtctccatgtgctggcacttggtggcctgggactaatgtgaatcatttttttgcccaaaataaacctgaattgtaaactgatttttaaatgtggaatccttgaagtaagcaagtcaaagtttgactgactgtatgtatctggttggggaagaggctcctcagcgctatggagggaaaggctgtgctctgacctgtctccacctggacttctgggcatctgaggcttatagatgcctttgtgtccagtgtggcagtggtgtggctgaaggcctccattttctctgcctggatgaattaagcataatagcttaattttgcatgtcaaactctgaaaatctctgtctgctcagaacgcaaaagagagtgggtattttctgacccagacagctgcttgggagcttagtcacgtccttcagattggctctatttcctaagccctggcctgctcagagaaagaatggtggcctccaacaggaaatgccttgtttctaagccttgattattctaaatggcttctgtttagatttgagtcacacacagtctcttgcccatgaagggaacctgtcctggttgtaagtgactatgtaccaatgccactttgggctggagagcttacacagctgccatgtggtaggaaagtgactatgcagggtgcagggtaatcctccagctggtttatagtatgctccttcctcaggattgactaaaaatggtggctttcctaacttcttcacttacactggaaggatgtggacatgaccgtgctgtcttggtcttaccctggcggtagccctctcagcctgactctgatatgagagctggactagatccctgttctctctccttgcctgacttgccagagatgccatagtggtagtgtggaggtggcttgtgggtaaggaccatggggcccaggggcaaggcttgactgggcaaagcttggagcagagttggggtcagaagcctaaacccaaagagtaacatctggccaggaagggtggggccagctggcgaggaaattgtggattctgttcctggggaggatgggtctaggagagggaagagaacagaaacgctctgtccagtgggagggctgtttcttccatcaagatgggcttgagttacttactgggtaatgactctggtttcagctgcctggcatcctgcaatagctgtcaccctgagcagcctgcctgttcagtcctcagcattcagtctggggagggattccctttgagtcccttcttatgaatcactcacagtttagaaaacagagtcggaagctgccgtgtcagtggttaatcagttggccctatgacttttaagcattcttggcagagaatgtactttctaatttgatttaaagttgtgcaaggatcgagcagccatatgtgattatattcaagatcatcgacattatctcattacatccaaggactcattgaatagagttgaaaataagcatgagaggcaaatcctagggaggggtggagaggcctgcttgtgagtagaagcacacacaggattgagtctggagatgggcagctcaagtgagggtagcccagacccactggctggtggggagtggagagacaaagtggggatctagagatggtcactcttatcttgtcctttctagagcccaggggctttgcctagctgacttcagggcccacacacagttaactacctgcaagacagatggtgtcttatgaatggaacagaaaatagactaaataaaataatttacaaagcctcctcctgaaccaggattttttggaaagaattctaaatagatgaaaacaaacaatttgatttcaaccaaattgttgtttttttgtttttatcctgattttcacccgaattgtcagtctcaaaaataaacactgatacattcccagaaaatatttttcaaataaaaactgactctgttaaagtttgccctgattctttcaaaactgtgtacaagacactgtcaaccaaagtgacttgcatatttttttaaatcaacttgaacatatgcagctacgatgtcattaactccctgctgctgggtgtttttagagaatgacataagaccctgggctgcatttctaacataatcacggggaagtcatggggacctccccaagcagctgaaacagcacacagcttagcagttcatctaggcgccttgtttgccactaatactgaggagcacactagacttcacctaagaggcctgttctaagagctccctttgtccaaggctgtgtacttccagagtaggcatggtgggtaaaaaatgttgaattttacattgcttcagatgcattgctcctctttctgctttctgagttagacattatattttgcaatataaattcacaatcaagtttttaaagggagctaaatattttaatccaattagacaagtgaacaaaacactgaatattacatgcagtggagataagtggttcttgcctttaaaagactgcaattccgtcacattacaaccccaaatgtcaatgttgtcttcatttgtaacactttcaaacacaaggcagccagaggctccactctgctggtagtgacactgtctgtcctttgggaattcttaaaatttatttcccatggaaatatgattcacataaaacaaatacctgcccctttgcagagaaagtggttgggagccaaaataatgacacatgccgctggaggggctctggtgatgagatgcatgcgtagaagacactttgcaggtgctcctgcaagagcatccgtgtctctggcccatccagagctgcctcccatcccttgaagtcctgctttgtctgaggacagcctctctgccctgtccactttcccctggctctggcttctgaagaggcagcagagccaggccatccatggaagggaccacagctgtcttcaaaatctcagacaggtggtcagcaaggagtcacttgtttatggtgacttgtgatttctgccttgcttcatagctgaaagtggccagaatcttggtattcctaccagaaactctggcctatgttggggagactgctctagggtctggtgggcactgctgagcttagtagctattaccacttgctaagctagatgtccttcataacccactacggtctggagcacacagacaggatactctattctccccatctgggttggtcattctggattgcctcctatcttgccctttagaatgttgttatgccagctgctcagttcttcatggatataccacagcaggccttgaaaatcatggtaggatctgtacctggaggtcacatgctctgcatcttaagtataggttagttcccatttggagcccaggccaagtgccactgaattttgtagtcactgtcaatatcataacaggatcatggggccactggagagaaatcatgtcatattctctcaggcagatggaatgatgtagcccaacgaaggagacatgtatgggaaagtggagcagctgggtgcatagaaccagaagggaaggcaagccatggaaaggatctgagggcctgaatgtacctctgtcacctcagaacaagcttggaaggaccaccgagaaagcccttactcttaaaagtagatgcctactgccaggggtataggaacagagtgtttggggccctcaccacatgaggtaaggtacacacagagagccagaaagaatgctgacttgagcagttgtaggacagacactaaagggcagtcattaggaggctgaggtgagaccagcctgagccacacagtgaggagtccaacctcagtggaaaggaaaagaaacaaaggaaatggcagcctggactacaaagcaagaatctaatccagcaggaagaagggctggggaccctaaagcatggtcaactgggaaacactttgggtcaccccatacatctcacttcataaaaagccaagtttaaaataaacttcagaaataaattgagcacaaaacccaaggtttggaggaaaaggctgtggtagaagggaaaagtggaaagtacgaaggccagctacaccaggctgtaccccagaatgcaagggcatctctcttctgttcccagggcagtcagggccagaaggccacaccagtggccatggtaacaggggagggctgaatggagagacagttgtcagaagctcaagctgagaacattgcctagacatacgccttctctccgagaccgagaccacagtggctgtagagttgaggacagaaatgcacattagtaacaccttggacacatgactgcagacaagtcagactatgatagtaactcacatttttgtgtctctggtactgtgtggaaagatcaggaggcactaaagaatgtcactctggcaggcagtgtggcagacacactcggagtgcgagacttgaagaggatatgcagtggcaataagaaacaatgtgcctacccaaagcgaagcctatactgactggagaggaacaactcttgctcttatgtgcatgtgacttcacatgtgcttgtcttgcctcgcatcctatcatcccaggaggctgtccccagtcaaaagggcagggcatgcagcagtagggagcccagcgctaccacattattagatggccttgggatcacaggaacccaaagactcacagagagatgcgtttctgggttaatgaagatcctgtgcaaagctccattctctgccacagggcctcacgcatctgaactgaaggaaggacttttttctgcccaagttcattcccctctgacttctgaaatatacttgtcatggtttgtgcagattcatgttcagtcacttactttcttgggttagaaacccttgtgcctaggggtacaggataccaggcaggcagcagtcttacctagctatcctcagagcatggggcagaggggtttcccaactagtcactttcagaaccagtatcagcttgttcagtgaatgctagcatcagcgttaacagaaaacctgtctgctggttaaattggtcacagacttggactgacagatgtcccagaccccctatggaagaatctgagaacagagctcctttgagctctgaaaagctcctcattgctaacctcacactgtcctttgccttttgccacattccctttgagaacccagtctgctcacataacagttcactaaaagtcatcatcatgctattcacacatggtaacatctacctgaatgcacatgaccttctccaaaggtggaaaaagaaaaaaggaaaagcatttccaacatgtctcactctcccaagttagaaatccctatcagggaatcacggatcccacaaggcagcagaattctcccttggatgctaggtccaggtccagggctgggtggtcccggacctgtgctcagtgcacaatctgtcccatcctggcccaatggaacctgcagttctggggctaccatagatagctctccttatactttcatccactgaaggtaccgcagaactagggagacattctaatagacctagtggccgtgtgcaatgtcagtatagtcaccaggggatggtgtttatcacttgcctaacccttggctgcccccccaacccccacccaagtgcaaaaccttagaaatgagagactcagtatcatggcccctgccttctagcatgtgagtggagcatctctgtgagagtgtaaaaacacatctgtatagtttcaagaaacttcaggtaacagacacactttatgttactttgtgccatcataatcttcccgtttgcccatctaatgtctgatcagtttcctaacacatagttcagcacaccgtcacaatgtcaactgtccacaggtagaagtacacacaggcctggagtacaggctgcgttcagaaggaaagcgttcaaagtgtatggcttgataccgatatacaaacagggctttctttgctctctggtagcagcaggtaaggtacaaatttttagtacagttggctacacataattttcacacttttagcaacagaaacttttcctccaaaacttcagtgataacagctgaccaaaccagcaaatgagaaaacaaatacccatgatctatttaaacttactttttattatcattttttttccagttacccagcatgccacaatctgattgctgacctggatgaaacagagtgaaataaatgatttacaaagagatatttacattcatctgatttgtacttaatgtgccacagtgcaccgaaacctccccagggagacaccaccagggactgcagggggggctggtcctcatgccatggtctgtccctgtgctatggacagggagtgcttgcttcagcatcaactggctagggctcgttgggagtgtgtgctcagaacagcttcaagtcactgatttacgttgtctctaaagtatacacatggattaataaaatgaccttcctaaagacttgagttgttccgtttccttttcattttgtagcaatgacaaaacacactgaaaggcacatgtttgaagtcagccaacgtggactgaagaccacccctcctcctgccggccactgcttcttcccgctcatgaccatgtctacctttagccagcatccagtatttcccatcgaactgtgtgcactcaggaagcactctgcatttttcttcccattctctgaacaacacaaagcaaacccctcccctccccccaaaaaggcatctttggctcgatggtgtcagatttttgtcttcaatagcagtatttgagaggagcctaaaaacaaatgtatgtgaaattagaaaatttacttaacagtatatcaaatatctgtacacagatcatattcttagtctaaaatagtatttctactatacagtcaagccctcaaatgcttcaaaggaata

SEQ ID NO: 320 - DNA, 3429 bp, Mus Musculus
cgcgccaacccgtctcttggcaacagcctcaggccgctaaactgtcggagtggcgctccgagcgcatagccctctgggaagcgtagtatagctggaaggctcataggactctcgaggctgcaggctttaagcctgagaactacaattcccgacgttcaccatgagggccagggggtaggaagagcccctaggagctcggtccggggttcctggttccctagtgacagcagcgacaggaagcaggcaggcatcccctcatccccagcgctaggcctgtcctcggaggggtgcactggatactttcccgcataactcccatctctgaccccatggcgaagtccccagggaactctaccctggaggacagtctggggcaataccaacggagtctccgggaacgtgccaatagaagcattcaccagttgaaatgtgccctgagagaagtggatgtcactgtagaagaagatgcactggatccttccaccagcatcaacgtagaaaatgaggacacaggggtggcctggcatgagctgcagcacagccatgctgtcagtcaactgaaagctttgttgcgtcaacaaacaaataaggaaaatgagacatctccaccgcgaagacgaaagttgtccccttcgcggccgtcagaatgtgacgatggcagcatgcccaccatgcacaacctcgttcctatcattaacgaccagtctcaatatatccaccacttagaagcagaagtcaagttctgcaaggatgaattgtctggaatgaaaaatagggtgcaagtagttgtacttgagaatgaaaggctccagcaagaactgaaatctcaaagaccggaggagacattgagggagcaaacattcctggatgcatctggaaacatgcagaattcttggattatgacacgagaagattctagggtggatgaagctgcaaagagaccattttctcatggtgatgctgaaactggcaaaactgcatccactggtgatgccaataagtggaagctggagctggagaggctgaaactcacatacgaggcgaagactgaccttctggaatctcagctgatgcttctgaggaaagacttagctgaataccagaaaacctgtgaggatcttaaggaaagattgaagcataaagagtctcttctggctgcgagtgcatccagccgtgtgggtggcctctgtttgaaatgtgctcagcatgaagctgttctttcccagacacacagcaacgtgcacatccagaccatcgagaggctgactaaagagagagatgacttaatgtctgtgctagtctctgtgcggagcagcttggcagaagcgcagaagagagagacaagtgcctatgagcaggtgaagcatgctgtgcagatgacagaggaagccaactttgagaagaccaaggctttgatccagtgtgagcagctgaagagtgagctggagaggcagacagaaagactggaaaaggagcttgcctctcagcaagaaaagagggctgtggagaaggagatgataaagaaagaagtagccagagagagggaagatgcagagtcaaagtgtactggaaaccactgtgcagacatttccatcaagctctctcaacctcggcgtccttgtctctcccttgcccctgtcaaagtttaaaggacttacctgatgtcagtgccttagacatccagctgtgctgcagctgtctgtgttacttctggctctgcaacagatgtggatggagaaactcctgcagtgtaatgctgacttccagatgatgttgatcctgtctcagaatattgccaagctggaggcccaggttgaaaaggtcaccagggagaagactgcagctgtcagtcacttagaggaaattcagaaccacgttgcgtctcaggaaatggacgtcacaaaggtgtgtggagaaatgcgctttcagttgaataaaaccaaaatggagaaggatgaggtggaaaaggaacacagagaatacaaagcaaagtctcacaaggatcttgaaatgaaagtccaggaaatagagaagttgagactagaactgagcgaaagcgagcagcatgtggaacaggagcagcagaaggcagctcgggccagacaggagtgcctgcgagtcacagagctgctgggcgaggccgagcgccaactgcacctcaccagactggaaaaagatagcattcagcaaagctttagcaatgaagcaaaggcccaagcccttcaggcccagcagagagaacaggagctgacacagaagatacagcaaatggagacccagcacgacaaaactgaaagtgaacagtatttactgctgacatcccagaacacatttctgacaaaattaaaagaagaatgctgcttgttagccaagaaactggaaaaggtctcactaaagagcagatcgcaaatagttcgacttagtcaagagaagagatacttgtgtgacaagctagagaagttacagaagagaaatgacgaactagaagagcaatgcatccaacatgggagggtgcatgagaccatgaaggaaagactcaggcagctggataagcacggccaggctacagcgcagcagctggtgcagttgcttaacaagcagaatcagcttctcctggagcgacagaacctgtctgaggaagtggcccggctgcgagcgcagttacccagcatgccacaatctgattgctgacctggatgaaacagagtgaaataaatgatttacaaagagatatttacattcatctgatttgtacttaatgtgccacagtgcaccgaaacctccccagggagacaccaccagggactgcagggggggctggtcctcatgccatggtctgtccctgtgctatggacagggagtgcttgcttcagcatcaactggctagggctcgttgggagtgtgtgctcagaacagcttcaagtcactgatttacgttgtctctaaagtatacacatggattaataaaatgaccttcctaaagacttgagttgttccgtttccttttcattttgtagcaatgacaaaacacactgaaaggcacatgtttgaagtcagccaacgtggactgaagaccacccctcctcctgccggccactgcttcttcccgctcatgaccatgtctacctttagccagcatccagtatttcccatcgaactgtgtgcactcaggaagcactctgcatttttcttcccattctctgaacaacacaaagcaaacccctcccctccccccaaaaaggcatctttggctcgatggtgtcagatttttgtcttcaatagcagtatttgagaggagcctaaaaacaaatgtatgtgaaattagaaaatttacttaacagtatatcaaatatctgtacacagatcatattcttagtctaaaatagtatttctactatacagtcaagccctcaaatgcttcaaaggaat

SEQ ID NO: 321 - protein, 439 aa, Mus Musculus
MAKSPGNSTLEDSLGQYQRSLRERANRSIHQLKCALREVDVTVEEDALDPSTSINVENEDTGVAWHELQHSHAVSQLKALLRQQTNKENETSPPRRRKLSPSRPSECDDGSMPTMHNLVPIINDQSQYIHHLEAEVKFCKDELSGMKNRVQVVVLENERLQQELKSQRPEETLREQTFLDASGNMQNSWIMTREDSRVDEAAKRPFSHGDAETGKTASTGDANKWKLELERLKLTYEAKTDLLESQLMLLRKDLAEYQKTCEDLKERLKHKESLLAASASSRVGGLCLKCAQHEAVLSQTHSNVHIQTIERLTKERDDLMSVLVSVRSSLAEAQKRETSAYEQVKHAVQMTEEANFEKTKALIQCEQLKSELERQTERLEKELASQQEKRAVEKEMIKKEVAREREDAESKCTGNHCADISIKLSQPRRPCLSLAPVKV

SEQ ID NO: 322 - DNA, 3170 bp, Mus Musculus
cgcgccaacccgtctcttggcaacagcctcaggccgctaaactgtcggagtggcgctccgagcgcatagccctctgggaagcgtagtatagctggaaggctcataggactctcgaggctgcaggctttaagcctgagaactacaattcccgacgttcaccatgagggccagggggtaggaagagcccctaggagctcggtccggggttcctggttccctagtgacagcagcgacaggaagcaggcaggcatcccctcatccccagcgctaggcctgtcctcggaggggtgcactggatactttcccgcataactcccatctctgaccccatggcgaagtccccagggaactctaccctggaggacagtctggggcaataccaacggagtctccgggaacgtgccaatagaagcattcaccagttgaaatgtgccctgagagaagtggatgtcactgtagaagaagatgcactggatccttccaccagcatcaacgtagaaaatgaggacacaggggtggcctggcatgagctgcagcacagccatgctgtcagtcaactgaaagctttgttgcgtcaacaaacaaataaggaaaatgagacatctccaccgcgaagacgaaagttgtccccttcgcggccgtcagaatgtgacgatggcagcatgcccaccatgcacaacctcgttcctatcattaacgaccagtctcaatatatccaccacttagaagcagaagtcaagttctgcaaggatgaattgtctggaatgaaaaatagggtgcaagtagttgtacttgagaatgaaaggctccagcaagaactgaaatctcaaagaccggaggagacattgagggagcaaacattcctggatgcatctggaaacatgcagaattcttggattatgacacgagaagattctagggtggatgaagctgcaaagagaccattttctcatggtgatgctgaaactggcaaaactgcatccactggtgatgccaataagtggaagctggagctggagaggctgaaactcacatacgaggcgaagactgaccttctggaatctcagctgatgcttctgaggaaagacttagctgaataccagaaaacctgtgaggatcttaaggaaagattgaagcataaagagtctcttctggctgcgagtgcatccagccgtgtgggtggcctctgtttgaaatgtgctcagcatgaagctgttctttcccagacacacagcaacgtgcacatccagaccatcgagaggctgactaaagagagagatgacttaatgtctgtgctagtctctgtgcggagcagcttggcagaagcgcagaagagagagacaagtgcctatgagcaggctttgatccagtgtgagcagctgaagagtgagctggagaggcagacagaaagactggaaaaggagcttgcctctcagcaagaaaagagggctgtggagaaggagatgataaagaaagaagtagccagagagagggaagatgcagagtcaaagatgttgatcctgtctcagaatattgccaagctggaggcccaggttgaaaaggtcaccagggagaagactgcagctgtcagtcacttagaggaaattcagaaccacgttgcgtctcaggaaatggacgtcacaaaggtgtgtggagaaatgcgctttcagttgaataaaaccaaaatggagaaggatgaggtggaaaaggaacacagagaatacaaagcaaagtctcacaaggatcttgaaatgaaagtccaggaaatagagaagttgagactagaactgagcgaaagcgagcagcatgtggaacaggagcagcagaaggcagctcgggccagacaggagtgcctgcgagtcacagagctgctgggcgaggccgagcgccaactgcacctcaccagactggaaaaagatagcattcagcaaagctttagcaatgaagcaaaggcccaagcccttcaggcccagcagagagaacaggagctgacacagaagatacagcaaatggagacccagcacgacaaaactgaaagtgaacagtatttactgctgacatcccagaacacatttctgacaaaattaaaagaagaatgctgcttgttagccaagaaactggaaaaggtctcactaaagagcagatcgcaaatagttcgacttagtcaagagaagagatacttgtgtgacaagctagagaagttacagaagagaaatgacgaactagaagagcaatgcatccaacatgggagggtgcatgagaccatgaaggaaagactcaggcagctggataagcacggccaggctacagcgcagcagctggtgcagttgcttaacaagcagaatcagcttctcctggagcgacagaacctgtctgaggaagtggcccggctgcgagcgcagttacccagcatgccacaatctgattgctgacctggatgaaacagagtgaaataaatgatttacaaagagatatttacattcatctgatttgtacttaatgtgccacagtgcaccgaaacctccccagggagacaccaccagggactgcagggggggctggtcctcatgccatggtctgtccctgtgctatggacagggagtgcttgcttcagcatcaactggctagggctcgttgggagtgtgtgctcagaacagcttcaagtcactgatttacgttgtctctaaagtatacacatggattaataaaatgaccttcctaaagacttgagttgttccgtttccttttcattttgtagcaatgacaaaacacactgaaaggcacatgtttgaagtcagccaacgtggactgaagaccacccctcctcctgccggccactgcttcttcccgctcatgaccatgtctacctttagccagcatccagtatttcccatcgaactgtgtgcactcaggaagcactctgcatttttcttcccattctctgaacaacacaaagcaaacccctcccctccccccaaaaaggcatctttggctcgatggtgtcagatttttgtcttcaatagcagtatttgagaggagcctaaaaacaaatgtatgtgaaattagaaaatttacttaacagtatatcaaatatctgtacacagatcatattcttagtctaaaatagtatttctactatacagtcaagccctcaaatgcttcaaaggaat

SEQ ID NO: 323 - protein, 700 aa, Mus Musculus
MAKSPGNSTLEDSLGQYQRSLRERANRSIHQLKCALREVDVTVEEDALDPSTSINVENEDTGVAWHELQHSHAVSQLKALLRQQTNKENETSPPRRRKLSPSRPSECDDGSMPTMHNLVPIINDQSQYIHHLEAEVKFCKDELSGMKNRVQVVVLENERLQQELKSQRPEETLREQTFLDASGNMQNSWIMTREDSRVDEAAKRPFSHGDAETGKTASTGDANKWKLELERLKLTYEAKTDLLESQLMLLRKDLAEYQKTCEDLKERLKHKESLLAASASSRVGGLCLKCAQHEAVLSQTHSNVHIQTIERLTKERDDLMSVLVSVRSSLAEAQKRETSAYEQALIQCEQLKSELERQTERLEKELASQQEKRAVEKEMIKKEVAREREDAESKMLILSQNIAKLEAQVEKVTREKTAAVSHLEEIQNHVASQEMDVTKVCGEMRFQLNKTKMEKDEVEKEHREYKAKSHKDLEMKVQEIEKLRLELSESEQHVEQEQQKAARARQECLRVTELLGEAERQLHLTRLEKDSIQQSFSNEAKAQALQAQQREQELTQKIQQMETQHDKTESEQYLLLTSQNTFLTKLKEECCLLAKKLEKVSLKSRSQIVRLSQEKRYLCDKLEKLQKRNDELEEQCIQHGRVHETMKERLRQLDKHGQATAQQLVQLLNKQNQLLLERQNLSEEVARLRAQLPSMPQSDC

SEQ ID NO: 324 - DNA, 3336 bp, Mus Musculus
cgcgccaacccgtctcttggcaacagcctcaggccgctaaactgtcggagtggcgctccgagcgcatagccctctgggaagcgtagtatagctggaaggctcataggactctcgaggctgcaggctttaagcctgagaactacaattcccgacgttcaccatgagggccagggggtaggaagagcccctaggagctcggtccggggttcctggttccctagtgacagcagcgacaggaagcaggcaggcatcccctcatccccagcgctaggcctgtcctcggaggggtgcactggatactttcccgcataactcccatctctgaccccatggcgaagtccccagggaactctaccctggaggacagtctggggcaataccaacggagtctccgggaacgtgccaatagaagcattcaccagttgaaatgtgccctgagagaagtggatgtcactgtagaagaagatgcactggatccttccaccagcatcaacgtagaaaatgaggacacaggggtggcctggcatgagctgcagcacagccatgctgtcagtcaactgaaagctttgttgcgtcaacaaacaaataaggaaaatgagacatctccaccgcgaagacgaaagttgtccccttcgcggccgtcagaatgtgacgatggcagcatgcccaccatgcacaacctcgttcctatcattaacgaccagtctcaatatatccaccacttagaagcagaagtcaagttctgcaaggatgaattgtctggaatgaaaaatagggtgcaagtagttgtacttgagaatgaaaggctccagcaagaactgaaatctcaaagaccggaggagacattgagggagcaaacattcctggatgcatctggaaacatgcagaattcttggattatgacacgagaagattctagggtggatgaagctgcaaagagaccattttctcatggtgatgctgaaactggcaaaactgcatccactggtgatgccaataagtggaagctggagctggagaggctgaaactcacatacgaggcgaagactgaccttctggaatctcagctgatgcttctgaggaaagacttagctgaataccagaaaacctgtgaggatcttaaggaaagattgaagcataaagagtctcttctggctgcgagtgcatccagccgtgtgggtggcctctgtttgaaatgtgctcagcatgaagctgttctttcccagacacacagcaacgtgcacatccagaccatcgagaggctgactaaagagagagatgacttaatgtctgtgctagtctctgtgcggagcagcttggcagaagcgcagaagagagagacaagtgcctatgagcaggtgaagcatgctgtgcagatgacagaggaagccaactttgagaagaccaagactgtatcccttgcgtgtgtgtgatcacaccagcagtagcctcattcacctcatattcagagggtctcctgattgcttcagaagcagtaacatgacctacaatatgcaggcttatgctttgatccagtgtgagcagctgaagagtgagctggagaggcagacagaaagactggaaaaggagcttgcctctcagcaagaaaagagggctgtggagaaggagatgataaagaaagaagtagccagagagagggaagatgcagagtcaaagatgttgatcctgtctcagaatattgccaagctggaggcccaggttgaaaaggtcaccagggagaagactgcagctgtcagtcacttagaggaaattcagaaccacgttgcgtctcaggaaatggacgtcacaaaggtgtgtggagaaatgcgctttcagttgaataaaaccaaaatggagaaggatgaggtggaaaaggaacacagagaatacaaagcaaagtctcacaaggatcttgaaatgaaagtccaggaaatagagaagttgagactagaactgagcgaaagcgagcagcatgtggaacaggagcagcagaaggcagctcgggccagacaggagtgcctgcgagtcacagagctgctgggcgaggccgagcgccaactgcacctcaccagactggaaaaagatagcattcagcaaagctttagcaatgaagcaaaggcccaagcccttcaggcccagcagagagaacaggagctgacacagaagatacagcaaatggagacccagcacgacaaaactgaaagtgaacagtatttactgctgacatcccagaacacatttctgacaaaattaaaagaagaatgctgcttgttagccaagaaactggaaaaggtctcactaaagagcagatcgcaaatagttcgacttagtcaagagaagagatacttgtgtgacaagctagagaagttacagaagagaaatgacgaactagaagagcaatgcatccaacatgggagggtgcatgagaccatgaaggaaagactcaggcagctggataagcacggccaggctacagcgcagcagctggtgcagttgcttaacaagcagaatcagcttctcctggagcgacagaacctgtctgaggaagtggcccggctgcgagcgcagttacccagcatgccacaatctgattgctgacctggatgaaacagagtgaaataaatgatttacaaagagatatttacattcatctgatttgtacttaatgtgccacagtgcaccgaaacctccccagggagacaccaccagggactgcagggggggctggtcctcatgccatggtctgtccctgtgctatggacagggagtgcttgcttcagcatcaactggctagggctcgttgggagtgtgtgctcagaacagcttcaagtcactgatttacgttgtctctaaagtatacacatggattaataaaatgaccttcctaaagacttgagttgttccgtttccttttcattttgtagcaatgacaaaacacactgaaaggcacatgtttgaagtcagccaacgtggactgaagaccacccctcctcctgccggccactgcttcttcccgctcatgaccatgtctacctttagccagcatccagtatttcccatcgaactgtgtgcactcaggaagcactctgcatttttcttcccattctctgaacaacacaaagcaaacccctcccctccccccaaaaaggcatctttggctcgatggtgtcagatttttgtcttcaatagcagtatttgagaggagcctaaaaacaaatgtatgtgaaattagaaaatttacttaacagtatatcaaatatctgtacacagatcatattcttagtctaaaatagtatttctactatacagtcaagccctcaaatgcttcaaaggaat

SEQ ID NO: 325 - protein, 367 aa, Mus Musculus
MAKSPGNSTLEDSLGQYQRSLRERANRSIHQLKCALREVDVTVEEDALDPSTSINVENEDTGVAWHELQHSHAVSQLKALLRQQTNKENETSPPRRRKLSPSRPSECDDGSMPTMHNLVPIINDQSQYIHHLEAEVKFCKDELSGMKNRVQVVVLENERLQQELKSQRPEETLREQTFLDASGNMQNSWIMTREDSRVDEAAKRPFSHGDAETGKTASTGDANKWKLELERLKLTYEAKTDLLESQLMLLRKDLAEYQKTCEDLKERLKHKESLLAASASSRVGGLCLKCAQHEAVLSQTHSNVHIQTIERLTKERDDLMSVLVSVRSSLAEAQKRETSAYEQVKHAVQMTEEANFEKTKTVSLACV

SEQ ID NO: 326 - DNA, 246386 bp, Homo Sapiens
  misc_feature (1)...(246386): n = A,T,C or G
atgcacttaggggatgcggaggcggcagcaaggggctcgggaaagccggggggccgcaggactggagctccggggggcggcgggtgggggatgggaagggtggtcccgtcaagccccgggtcccaggcgggcagagggtgggggtggcggcgccgcgcggagcacccgggaagcgcccccttcgcggtccagccccgcacccccgccccgcggcgggcggcgcccgagtcctcgccgcaaacccgaggagcaggatgtggaaagcagccgcggcggtggctgcggctgcggcgcctacaccgagcagccgatcgcatcacttaccccttaccgtggagagagggaccggacgggggaggcggggcgcgtcgcgtcccgtgagtctctcgcacgccgtcctccccccacctcgtcgtcgtcgtcgtcgccgctgttgtcgtcgctgccgctgcggtcgagctccggggccctcagctccgctgggcaataacgttattccacacacgccccacacatagcggtaacggcaaagaccgactgcctagtgcgcaggcgcctcgggaaagggcgaggagccggaccctatcccctcctgcccagttccaacgatcccttactgcgcaggcgccacacacagacaatgaaaaggggttgtgcgagggtctcacccacacgcttttccagcttgcccactgcgcaggcgtgccccgaaagaccagcttgaacaatgaagaggacctcggcgttaggtgggaccgcaaccaacaaggactacagttcccagcgggcagagcgccaactccaagtgaaggtccggttgctgggcatgctaggagttgtagtgtcggccgcctttacaatctaggctgtttggaagatttagagcttctatttcttgaagatttattcgaccgttttaaaaaatctcgcaactgaagcagggttcagagtttactatctgcgtccttgagtagcctggggatcaactgctgcatattagcaaatttcgaagcgtcaaggccttcagtgagccctttctgtcatttgggtggtccaggcagctgaagagtgggatggaggcgggactaaaccaggctgggctggaggaaaagggcggggcctgcaagcctgtctcttggcagcaggctctggcagccaaaccgtccaagctagcgcctggagcgcagtggtttctgggaattgtagtgtaactggaaggccctgaggattgtcgagcttgcaggttctgaacgtgaggactacaactcccgacgtgcaaagcgagggccagtgggtgggaagagcccccaagagctctgtgcgggattctaggctcccctgtgacagccgcggcaggaagcaggcgggcgctccccggccacaggcctgttgttctcggaagggagaaagctggacatttccccacgtaactcccagctctgggcctagagtgcgtgcatggcgaagtccccggagaactctaccctggaggagattctggggcagtatcaacggagtctccggggtgagttgctccaaacctctgtccctagccccgaggtgcccagggcctagtgggcgggagcagaccaggtgcgtttcctaacacctgggttctgccccgtccacgctacagaggagcaagatggatgttgctgtggtcttgaggaggatgaaatagtttgatttagtttttacagttaagcaacgatgtttcctcagattcccgtagttacctcaatcaactccttgatcttaacttggcatctttctcaaccggcgacagcagaaactcttggatagctctatgccatttttgttcagttcccatacgttgctatttaatccaataaaagtctgattcacagtttttacacatttaaattatggcacagtggattgaatgtgatttatgggatcagtggggggaaacactaataattattttaatcacaagagcccccttttaattgatttaggctatttacatacagtaaatcatctgcagcttacaccaatcgtgtgaatattttacacatggggaaagcgaagctcagagaggttgaattacaggccagagcccacacagctggttagttgcagagccaggtattatcaggcttgccttcaaagcctatgtttgtatttactaatcaagccataattactattatcaaaaccttattaatttagattttcttaccacattaccatatgagcaagtatctgtacaaataatgtctgtatttattttcctttaagctctgttggacttaatgtctgtacttttagatggcgctgtcaacttggacagcatatataacatctagaaatttcgattctgttataatggaagttatggaattgtccatagggttattgtggggagcaaatgaaataatccccataaagcagtgattttaagacttcttaaaatgtttacctatagtaagaaataaattttatatgggacatatgtgtacatataaactataagtttcactgaagaatttttattctactaaatgtaataaactctgctttctattctgttgcattttcataagcctctaggtcatgactgtttgcgacattgagaatactaagttatgaagcatgtgttgttctgcataatatgcctactatgtgtcagtgcctcctactatgtgttaagcatactaggtgctaggcatgcagtaaggaacaagacaaagttcctatccccatggagcttctggattagttggggagaaagacaaaaaaaaaaaataattatagattactatgatagaaagtaagggtaaagatcagtgcttactagacaagcactcattaaatgttaattgttatttatacttgttacttaaagcaaagtgaaggtttttcaatattagaaagtttatcttctcatgactctagattttataagggttactatgtattgttacatctgtcaattgtgttaacaaactgtcgacattctcagtattcaaactgcaggagtaaaaaaatcggttttaatgaacaccttcctcaacctactgatgtttcaagagctgttagatacaaaataagcacttctaacttttcatttggaagcaagaaaaatactgtgcacaatgatatgagtaattgtaatttttaagattggcaaaaattttttgttttcattgaaagtttttcctgatgcttctcttcctttgaccttattttaagtctttatataattgtcggaggctgtttaacattaggcattttgacgcagtaaaggggttcattttaaattaatgttatagtaatatgtttaatactagtggtactgctttcaataattacagaatgaagggttttcatttaaggataatacattttaaaattagtttgaaataaaatttaaatttagtgtgataacaatataaggtagtggaaacatttcaccaagagcaaatacgaaggatagaaaaagttaaacaacttaaaaaaaaacgtattcataattttaacagtgaatcaggaaatgtaacctgaaatgtttatgggtttttcaggacatatcatttatttagtagcacttttatttttgtatgttagcttatataacagcttctggaaggaaacaaaacagaattaactctgaacttaagtacagtcagaagttcttcacaaatataaattgctatttttgagtagtataatttatttatttagagatggagtctcactctgtcatccaggctgaaatgcagtggtgccatctcggctcactgcagcctctgcctcctggattcaagcaactctccagcctcagcctcccaagtagctgggattacaggcacgcgccaccatgcccggctaatttttgtatttttagtagagactgggtttcgccatgttggtcaggctgctctagaactcctgaccttaagtgatccgcccacttcagcctcccaaagtctggggttataggcgtgagccaccgcgcccggctgataattccctttaaagtaaagtattctgttccttaataaacaatgctggagttatgtggaaattccttattttgagtgtgcctaataatttaagaattgtattactatgtagtaagataaaatgcagtttaaagttctatgtcttattttgttttggttttgttggtttgtttggttttgtctacccaccattacttccccaaatgccttgcgtagtttatgattaatggaagcctaataaacagtcttggtctttcctcaccggtttttcctctagcttgtaaataactgcacatgtagtcactactaatatcccttcattgatattcagccaggaagtggccgcataaaaatgcaaaatgctttccctattttccgtgatcgtacttccattttaaaaagatcttttcctggggccgggcgtggtggctcacgcctgtaatcccagcactttgggaggctggggcgggcggatcacgaggtcaggagatgggagaccagcctggctaacacggtgaaaccccgtctgtactaaaaaaaaaaatacaaaaaactagccgggcgtggtggcgggcgcctgtagtcccagctactcaggaggctgaggcaggagaatggcatgaacccaggaggtggagcttgcagtgagccgagatcgcgccactgcactccagcctgggcgacagagcgagactctgtctcaaaaaacaacaaaaacaaaaacaaaaacaaatttccttatttctttaatgttggtactattatggtatatcaaaatttgaagttctaatgtgaaaactgagtcagcatttactttcttgtttttaaaatgaggttgggcgcggtggctcacgcctgtaatcccagcactttgggaggccgaggcgggcagatcacctgacgtctggagttcgagaacagcctgagcaatatggagaaaccctgtctctactaaaaatacaaaatgagccaggcgtggtggcaggcgcgtgtaaccccagctactcgggaggctgaggcaggagaattgcttgagcctgggaggcgcaggttgcggtgggcggaggttgcagtgtgctgagatcgcgccactgcactccagcctgggtaacaagagtgaaatcctatctccaaaacaaacaaacaaaaaaagatattttcctcatttctttaattttggtactattatggtatatcaataatttgaagttgtaatgtgaaaactgagtcagcgtttactttcttgcttttaaaatgagatccttgcctcattttgaccttgatgatcttggagcagctccacattcacctttcatccattcccttacacttttcagtggatttgctgtttgacttctctaaagatatctcttgctttgggtcgcctatgcccttttacaagaaattggagacatttaatgattcttcttcaaaacgagagttctggcagaaaaaccggaaggctttgttgcccccacagatctgttgtattattcctacatagtaaatggtctgaaagtttccagtgtggttaaaagtgtatgtatcctgggtatcctgggaaccacagaatttaatctagaactggaagtgatttgggaggtctcttggcagtaaggttaggtgttcatttactctatgggtagttataattcaacaaccacagaatggccgagaactacatttgtaagtgggcaagatagcacatgccccttctctaaattcaatacatcgttgtataaagccaagaggtatgaaatgaactatttcatagccaagaaagggtgaaaaaagccacaattataggcaatccaggctctattttaagtactgcacacttgagtgtaaggggatatcagaaaggagaaaaattgctagaaatgcagtattttagccttaataacagaatcatgtctcatctcttgctgcagcgttgggaatagataacaattttatcaacaacacctgtatacatgactcacctattcacctcattcctagccacctttggttgggtgagtataaggaaaaatgaaacaaacttcttgtatgacaggaactcatgattttctatatacattttgcattctggttttacctttttctgtcaacattttggtgtttcagcctttagatgaacttatgggaagagtgtggtggggtcagaggagagaatgtggagctgggagccaggtcactgcacttacttttgctttgctgacaaccatctgggtaaccttaggcaagtgaaacacactgttcttggattcccgtttcctcaactgtaaaacgaaaagtttggactggatgtgagaattattgcctttaggtgccaagcaaatgatcaaaaggtatgatggagtcagtggaagacattaagggaaatgatgaggcttatggccaaattgggcagtttctgctttttctaaaaacatttcaatttcttccttgctccctccctctttgcttccttttttttcttctctctttttccctcttttcctccctcttttcttccaagaaggaagccaagcaaaacacacccagagcctgattcccctttagacaccactctctgaccctttgatcattaatgttccttccatcagcacttgtttggaccagatgaatgattaagggctatgtttttgtcttatggaaatgagagtaaggagttgaaccaggtacacagaaagtgagaggatgaatatgagaagaaaatatataatctcagggatgggccttgtctttacgaattgatgtagttcaagaaaaccaaagataaggttgactttctatgttttgcttgtatatgattagcacatctatccaaatcctgcaaagtggctcacaattgtagaagggctgtgttagtcttactagccaacaatttggtcagtgtattagccagcagtgatatcatctggctgtcttaagaaaacatatgtgtaactcaaataagtattcctgttttcttataaaacttgtatttcttttttgcttttctcaaatattttctggatttttaaatattgtttgccatatgcactatataggaatatacacacataaacatgaggggttttttgctgataaaattcaaattatacatattcatcttttgttttatatattcatgtggcttttctttttcttttttttttttttttaatctcagctcactgcaacttccacctcccaggtttaagcgattctcctgcctcagcctcccgagtagctgggttacaggcacgtgccaacacacctggctaattttgtatttttagtagagacggggtttctccatattggtcaggctggtctcaaactcccaacctcaggtgatctgcctgccttggcctcccaaagtgctgggattacaggcatgagccacggtgcccgactttttttttttcttttgagacagggtcttattcttttgcccaggctggagtgcagtgatgtgatcttggctcactgcaacttctgcctcctgagttcaagcgattctcctgcctcagcctcccgagtagctgtgattacaggtgccaccaccacgcccggctaatttttttatttttagtagaggcagggtttcaccatgttgcccaggctggtctcgaactcctggcctcaagtgatccacctgccttggcctcccaaagtgctgggattacaggcatgagccattgtgcctggcctcatgtggctcttcttagtgcctttaacttttatgatcttttattttactagaacttaaaagtacaatctcaatttttctttcctactactgatgagataaaattggcaaaagacaggatttagcaaccagaaaagaaatgagtgttctacaagtaaatagtcatccctggaataatctaaatcaaaggtatgtttcagtgttaggagattgtaggggtactttttcatgttctttgtcagaaataggtatagagtaagtttttttcaaactattgagatactgagagtaataatattctctcctgggatgtttaaagacttatggtctgatcacattgccagtttgtgctaagattttcaccattttacttgatgataactcttctcagagtccaaaagtagacaaggtagctagaaatgcccttgtgcactggctgaagcaatcctgatgatggcggaacttcatcaaagcccactggatacttaaagggatggccttagggcaaatattgcttttaggccctgaaacaaaataaagctaaatatgaatctgagctcttgcttctgatagatataacacctattcctgacacctggatcagatgtgtcccatcatggcactgtcggtctcaggctgtgtcctccccaccagcactcctgtggcagaatagctcactgtcacgctcattttccatcaagaggcggcaacacttacaatgtaatgtggtcagagtgatagcaagtctcccctcaacactgaaaactcttgttttattgatctcgttttattgacttgaaaactgtcttgttttattgatttttttttattgtcacaattgggggtggagatgagtgctgctggcctctggtaggcagaagccagggatgctattaaactggcacaacacagccccttccaaaagagaattatcaggtccaaactgtcaatagtgctgaggttgagaaatcacgatctagaagtacaggctttgcttgtagcccttgatctgcaagaatcctactttacagtaattacaagtaaggatatacagattgtatttgctggtgattttacctatgttctttgccagcctggctaggtttacttcttttatcagtggaaagtgacaggtgcatcagtcctctccactgatgccaaagaaataccaggtgtatcccttagaatgcatatagccaatctcctggatttgccaacacccacatatctttaatggtcttccagacattgctttcttaagatgtttacattctttatcagattatcttttactcctggcgccaaccactttagcatgttttcagttattagagtcttaggatagtattttctttgagattcaaacaaaaaagtattctacatagtacttgtaatctctttcacaattgtaattgcctttcacaaagccgacattgtctgattttttgattctgctgtttatatcttggtagtgttacctgttggtcccctagtaaacagtgacagcaatcttctgaaccaggctgaggcccagtcaagtgtagatagacatgtatttcttatctcactgtggttttatttttctgcatgtctgccctaatcaaagcttgtgctgggagctgcagtgcatctcatatctcggcctcgggaggaatggttcattgcatattctctcagagacagctgggcgcttcgcagggagtggtccccctccctgtcaccagggcaattctctttcacatctcccaggacagatggagaatgaagaaattaataattcatagtgtgtatttaagtggtgattcttcctagactgagacatacttgcattttgttcaaaaacatcttgatgaagacaggcccagtggtgacctaagagttagaacataggaagtagggaaactcttactaagaaaatggacaatacaggccaggcagggtggctcacgcctgtaatcccagcactttgggaggctgaggcggaaggatcacctgaggtcgagggtttgagaccagcctgaccaacatggagaaaccctgtctctaccaaaaatacaaaattacccaggtgtggtggtgcatgcctgtaatcccagctactcaggaggctgaggcaggagaattgcttgaacctgggaggcggaggttgcagtgagccgagattgcaccattgcactccagcctgggcaaccagagcgaaaactccatctcaaaaaaaaaagaagaaagaaaatggacaagacagactgaaattagctagcagccattagctcaggtaccttttaagtgctcattgtactgattgatgtttggatagtgcattagcagaaatattatctacttgcacttacgttcatgtgatctgtaggactcaggggtcctgtttgtgtctgtagtcatagttaagtttatagtcagttcctggttggtgctggggaaaagaaatcaggatgcattcattgtgaaatacccttactgtcctctcaggagagaagaggaaatgagtgtgttctctctcttggttagaaacagataaagctgtgtcccattagcagttggataggaaacggtaactggaaccttctgtctaatctggtttccttaaatgtaaggagcagataactgcatctggggagtagtgctcttaataaggattatgggggcttcagttgcaatggctccagttgaagagccatgggatttcatctgtcctgaatcatctgagtgttattcttcttcacattaactgtgtttatctgttatagtatataattatgctggtttgttatgtatttgaaaagcacttagcatgttttgaaatgtagcgttgaaatgactttaaaatgtcaactctgtagttttagttttagggcacagttcttgcaaattcctgcttttcctctctgaccctagtaactctgaaatcagtagttgcaaacaaacaaaccctaaagccttgtgtgtcacttttctttgggatagttgttgaattcaatagctcattatttcacgtaatattatgttcatagtgcaatttaacatgtagtctttgaatgttataaattctaaaagattaaacaagaacattagaaaaggaatgaaaagtgctcttaaaatcctgccctaggccgggcatggtggctcactcctgtaatcccagcactttgggaggccaaggtgggtggatcacctgaggttaggagtttgagaccagcctggccaacacggtgaaaccccatctctactaaaaatacaaaaattaggtgggtgtggtggcgcatgcctgtaatcccagctactcgggaggctgaggcaggaaaaatgcttgaacctgggaggcggaggttgcagtgagccaagatcgcaccattgcactccagcctggggacaacagggagacttcgtctccaaaaaaaaaaaaaactcctgcctttcttgtaatctgatgaaagaactctgcctacagaggcttttaactatgcaaattctttccatattttttttctttttcctaatatagtttattagcttttactcagactaggtataaataaataattatcccttgccttagaggtgaagtcatttgaaagctccatggaatacatttcttctttaaaaacgcaacaaaaattttttattgtaaattgacaatttataattgtataaatttatgggttacaaagtgatgtcataaattgtggatacaatgtggaataattaaataaagctagttaacatatccaatacttccaatacatttctgtgatgagaacatcaattttgaaatgtgtaatactccattattaagtatatgcaccacactgtacaatagaactcaaaaaaagtataaaacatattcttcctgtctgagattttgtaccctttgaccatcactgaatttttttttctttttctttttttttttttatgagacagtctcactctgtcacccagcctggaatgcagtggtgtgatctcggctcactgcaacctccgccccccggcttcaagcaactctgttgcctcagcctccccagcagccaggaccacaggcacacaacaccacaacctgccaaccttttttgtatttttagtacagatggggttttgtcacgttgttcaggctggtcttgaactcttgacctcaggtgatccacccaccttagcctcccaaagtcccaggaccacagacatgagccactgtgcctggactaaaatttttatgagacaaaatatcaatttcaaaacagcatcaaaaagtgagtaggccaggcacggtggctcatgcctgcaatcccagcactttgggaggccgaggtgtatttttctgtactaaaaatacaaaagtatttgtctctattataaatacaaaaaaaaaaaaagaaattagctgggcactgtggcacatgcctgcaatcccagccactcaggaggctgaggaaggagaaccatctgaaccctggaggcagagccacagtgagctgagactgcactacttgcactccagcctgggcaacaagagtgcaacttcgtctcaaaaaaaaaaaaaaaaaaatgctgggcgcggtggctcacgcttgtaaccccagcactttgggaggccgaggcaggcggatcacaaagtcaggagatcgagaccatcctcgctaacacggtgaaaccctgtctgtactaaaagtacaaaaattagctgcgcgtggtggcgtgtaactgtagtcccagtttctcgggaggctgaggcaggagaatggcgtgaacctgagaggcggaggttgtagtgagtgaagatcgcaccactacactgcagcctgggcgacagagcgagactccgtcttaaaaaaaaaaaaaagaaatatacatgataggaattccaggaatcttatggattcttcttttaaggtcccggtcactgggcgtggtggcttacgcctgtaatcccaagacttttggaggctgagacgggcggatttcacctgaggtcgggagtttgagaccagcctgaccaacgtggagaaaccccgtctctactaaaaaaaaatacagaattagccgggcgtggtgacaggtacctgtaatcccagctattggggaggctgaggcaggagaatcgcttgaacccgagaggcggagggtgcggtgagccgagattgcgccatcgcactccagcctgggcgacaagagccaaactccctctcaagaaaaaaaaaaaaaaagtcccggtcaactgtgggcacaatgtaacacttacacacacttaggctgagttactctctgtactaagcagtcatgtgcataggttcctgtgtgtgtacatggtaattgttcaaatcttggatccttggcgatccttagagccactcaatacttctgccccaatttctcaatttcagccattacacaatcagttatacaagggatacacttgacatgcagacagcccatcattgactgcactaagtccagtttggcttttatggaaaagttgataaagttggtatcaacgaggatgtggtaaggtgggcccagctgtgtattatattggcaaaataatcaggaaaggtgttgcggaacttctctttcctttaacgcgctgggatccttcttttctttctctttaggttttaatctatccttttctttaagcctctgatctctgagactaagcgtttgcttcatggttgtatagttcctcattttcttttgcttcctcatggtcacaccacactcctgtttcttccgtaatcaccaacggtgcaatgcttttacctggaatacatttttatgttagtcaaactgtctcgttcctttctaatagattcaataaagataagtgttttattcgtggatttaagggcataaatctaaagctccatgaactgaattgcttatcatgtaacactttgattttccttttccatgaccaaatcgcttttctattctatttcctaatactaagttattgtaaaactatcacagtttcatatattcccaaaaccaggaatgcgtcttatctgaacttccttaaactcatgatgagtcagaggaggccagttttcattagtaatcagcgccaaattcatttcaaagaaagatctgtgtggacataggattggtatggagaaaaatatggtgataaattaactgtgtctcttgtatagttgagtaatagaatttcattgtcgaaccctgacctgaaatacatgttttcttttatcaaagtagaaaatgagttgctgcaagtaaagaaactgtattagatattgtataacagagactttttttttctattaagtactaacattgcttttgtttctgttccaaactttgaaatcagtgcacttggacaaaatggaaactgcttttcaaggtcctacagaatatatgtttataaatgtatttttatacatggttggtaatgaatcaggtctctttcgtgccattgcagttagagggcctctggtgctggagtcctctggaggactgggctgtcagagtggggcagcggggtgcagcgcggggagggcttttctctttcttcgtgcctctggtgctggagtcctctggaggactgggctgtcagagtggggcagcggggtgcagtgcggggagggcttttctctttcttcatggggtctcagggcctctctcttcctctccacgtatgctcttcacaggtctctccagcagggtagtcagatatcttacatagcggcttagggctcccaaaagcaaacattccaagaggaagcagaagctgccagtccttttaaagatgaggcttgggtgtgacatggtataacttttattgcattctattggttaatgcagattacaggcccagtcagtttcagattagaagagaacaagggaatgaggctgggttccttggaggctattttttttttttttttttttctgaaacagtctcgctctcttgccaggctggagtgcagtggtgcgatctcggctcgctgcaaccccttggaggctatttttagagatgaactatcacagtaatataccttaaaatacttcattttagacagtttttgtgtgttctaggggtggtcagttgcactaaccaagaatctatgaggtgtggttggccagcagtatatagaaagagctgtaccgccggggctgccactataagcacttcagctatgcaaattttgatcaaaactaggccagacatgtggatgtctcttggtgggggagggatttcctgtccccagggacaatgaggcttccctaggttggaactgggtgtgacgcagtcccttttgctggctcttcccacctccccactgctcctttcgtccccctctgtctccaagttggtaaaggagtcaggcatggtgggaaggagagcacttcccttagcaagttattgtttaatgggagctggtgggaagagttctgtcatttaatccttgccggtggtgctatatgtagtgaaatcaactgctacagtggtaggggccttagagatcatcaagtcctacctctaaaccatgaagttaatcttctctcaccatctttggcacatccctcagcaagctagaaacagaactctgcgttttttccataaagtacgagaaataatgatttcacctttaaaaactgccttcctgagtaagtgtccgtttggtcaaccagactccatgggtcctaactttcgtcaggttgttcttgcagaacatgccagcagaagcattcaccaactgacatgtgccctgaaagaaggcgatgtcactattggagaagatgcaccaaatctttcttttagcaccagtgtgggaaatgaggacgccaggacagcctggcccgaattacaacagagccatgctggtgagtgtgaatgtcaatcctagtctgaatgatgcatagtgaattttttaaactccgtagaataataactccattcattcttcattctgctgctgtgatgttattcctcaaacacaaatcagataatttaattccctcgcttaatcttgttttcctttgacttcccaatgcttataggctaaagtccaaaattcttagttataaaataacagtgttttcctaagatagctctaacctgcctcttcggctcatctttgtgtacttctcatgctaatcatccatctcacaactcatattctagttataataacctcctctctatgcttttatgctttgacatgtgcagtgacttctaactggaatttttcttatccttttctgcttggtgaactccttcctgtttatccttgcagtgttatctcctctgtgaaaacaagcacaattagcttcttcctcttcttgtagcactgtgcatagctttaggtctacatacaaacttattttatatctattagtgtctctctcttccttgctagattcttagctcttaaggggtagaaattctttttttttttttatgttggtcttgtatccccagttgatagcagaattcttgatgcataatatatcagcaatttttattagttggaaggatggatgggtggtaagaaaccatggatctcaaataaggttaataaaccctctgcttttgctctatagttaatcagctcaaagatttgttgcgccaacaagcagataaggaaagtgaagtatctccgtcaagaagaagaaaaatgtcccccttggtaagtatcaacttttccaagttgacaaagcattcctgtgttttactgtattgtgttattttgtagtacatgttgcagaaaaaatttaagcatggcatactaatagtgaaaaacattaaaagtaattctcttccctctgattattttggctgaaaaaatagatttccatggcagagggaatcttgatttttttaatttattattcacttggaaaatgggagcaagggaatagtttggagaatttattttgcaactgttagcaaaatatgtaatataaatatataatatataataaattaatataataaattatatgtcagaatatatgtaaaagataaagtcattattttagtaatttcttttttagagggtcatatctattattgatcatttttagaagttacttaattataattgtagccctactttgtaatattttttaaattttgagtgtcaaaataatacattttatttttaattaattaattaatttttttgagacagagtctcattctgttgctcaggctagagtgcagtggcatgatctcgcctcactacaacctctgcctccctggttcaagcgattctcctgcctcagcctccctagtatttgggtttacagatgtgcactaccacaccaggctaattttttgtatttttagtagagatggggtttcaccatattggctaggctggtctcgaactctgaacctcaggaaatccatcagcctcggcctcccaaagcaccgggattataggtgtgagccaccgcgcctggcctcaaaataatacgttttaatatgtaatgttctatatgttaaaatatatggttataaaatagtatgatatataagaagtggtgctgtatttcttctgaagttgtttgttattgctttgacagagtgtattatttctgattaaagcattttatatgctaaaggctgagatagatgtgagtgaaagcactctggaccagatttaagtggacaaaataatagtcaagggcttagttctatctagggtctatcacatactctctaagatattgtgcctgtctcacagagtttttggaataatgagataagattacatacttaaaattctttagaaacctatgaagtgttacataaacataacatgcatagcagcaagtaaccacctcacattttcaatgtgttttctagttcaatacaatgcctgtatgctgaaaagtgtggagacatgtcactttcttttcttcaccactgaaatatcagagtatcactcccatacgaacactccattccaggctgacacatacttttaagcttaattcctactttagagaaatgtacttcatatgcatattctaaatttatagatacagattttataattttagtaaaacatctcatcatttaatgaatttattactattgacatctggtttctagcttgctcttaagcacagactggtggaatgcttttaaatctactagatgaagttgctttatctgttgaatgctcagacatgcttatttgccttttaaagtctgagcagtgatattatggagcttactgaatccagacaggcaggaagaccttcactaagagaatcagtttagtacatacagagtgcactttaaaatacacaagtctatttatatggagctatgtaaaagaatggaacttagactctatatgtatacagcctacatgtaataattataaaccataatagtaataattagctttttaagattatacctttagaatgcactttcatagccagtataacatattagaaatacatgcatatattgagagtaaaactgaggcactgttgagatggaaaaaaagttattacttattgtcttaaaatgtagatatctaaactaaagcccttcaaagtagacacaaatgatttcatgtgaacatttttcatacaatattggcttgagctttttatttttcacattgacttcctcctgtatactcatagtagtaatttatatttgcctatcttctgaacctattgctattaatggaggatgattataattgtttgatttctactcaggacagataattcatttaattagagttactttggtttttaaatttcttaaatataccaaaaaaccaaagctctattttattttattctgccatgatagctggtacttgattatcatttaaaatgtctgctgtgctgagaaagagagtggctgagaaacagacactgtgcctcatttcaagctttcctctggctttgtttaactggttgacccttgttttaccttttcctgatttcctcatcctttaaaaaaaaaattatgtgatgggtatatgattttacaaactattttaggataaggtaagctatacattaacagtcagttccaggaatgctacagagctaaaatagcattagcgtttttttgaaatctcttcgttggacccctcaatgcagtgtgtctctactttagggttctactcttggaggttctatgctccagaacaccatacacttgaattgccttcaatactagagccaaaaatcaaaaactacattttgctaatgtatcttttttgagatggaatttcatcgcattgacactggcttggcatcaaacgcttcctaaagaatctctccttcacggagctgctgcagttttagctagcaaatcctcttccatggcagtttcttggagagagttgtcccttgtatctcagcattactgaatggaatgttgtttttccaatttgttaaaatagtttattccaagccagttatactactgctaccccagcatttttccattcactatatgtgctttttataaccactttcaccatccatctttaaaaaaaatgatattcacatccatgaatcttgtgtatttgtggaatttataggatagagaagcaagtatttgtattagtccattctcgtgttgctaaaaataaatacctgaggctgggtaatttatttaaaaaagaggtttaatcagctcatggttctgcaggctgtataggaagtgtgatactggcatctcactctggtgagggcctcaggaaactttcagtcatggtggaaggtgaaaggggagcaggcatttcatgtggtgagagccagagcaagaagtgggagaggtgtcacattcttttaaacaaccaaatctcaccaaaactcagagcaagaactcattatcatgaggatagcaccaagattcattcatcatgaccgaaacacctcccaccaggccccacctccaatgctgggggccacatttcaacttgaggtttgtgggggacaagcatccaaactatatcaagactataagctacattgtgatcgattctatgtttatatcacatcagtgcaaaattgagtatggagaaggtaacaactgattctttgctaaatccaaacatgcttaatttggctttttaaaatttatgtatttatgtatttatttatttattttttgtcatagaggtcattagaacatgaggaaaccaatatgcctactatgcacgaccttgttcatactattaatgaccagtctcaatatattcatcatttagaggcagaagttaagttctgcaaggtaagtttctcattaagaatttaaaactaaataaatgaaagcttatattaactatagattgtattaaaatttgctgctataaatcttcatgtttgtagcaatacattgacaattgctattcttacgtgattgagagactgatgtgtcacaagagcttgtcagacttgggaatgatgctcttgaccataccatttctgattgcttgatttcccagtagttcattactatgtctaatgatttcataatatgctttcatatttcagaagttttccttctcaccccgcttgctgtagcccagcaaatggcaaatgctttggaatacaaataccaatcattctcccatacttgtcaacctactggagcagtggtacagcaatcagggattctaaactggtagaccaattcttctccgctgtcagtattaaggctcttactttgactttgaatgagaatggttcatagggtactgacagtaatgatcaagaaaccaaacacatcatatatagcttatgacactagaaggttatatgctcaactgcgtgcagtttgctaatgtcattaatgctaatagagccttttcatcttcccgaagtatgtcgtgttttacttttttttttctgtttctttctctctttctttctttccctccctctttctttctttctagtatcagtgtattcgattgtatgatatttttataggaatcactgatatctcttgtatcatgtttttatatatagtatatgatattatgtattatattgttgacattttaagatgcaaggccagtatgtaacttaaggaggctttagatgtttcactgtcctgattttaccggggagtttctgatcttaacatgtaatttcctgtttgttcttggaggacacagttattaatatacacgtggtcctggattaccagtaaagctgaaataatatcctaggaactatttcattaacaagactctattaatccctaagatgttgtggataaaacttgaaagatataaagcagaataaatttactatctagttgagaagacagaactattccctattaacaccataaggagcacattagagaacatagtataggcctttactttttggtataagctataattataataagagaagaaggttaggaaaagctactgtctttgggaatgtttctatgggagagagagatcttgaaccaatgttttttttttttttttttttttttttttgatggagtctcgcattgtcgccagactggagtgcggtgtcacagtctccgctcactgcaacctccgactccctggttcaagctattctcctgcctcagcctccccagtagctgggattacaggcctgcgccaccacgcccagctaatttttgtattttttgtagagacggggtttcaccatgttggccagcatggtctcgatctcttgacctcgtgatccgtccgccttggtctcccaaagtgctggaattaccggtatgagccacgatgcccggcctaaaccagtcttaaaggaataggatcatttagatcagcagaagggagatgagtttcataaagagaatggcaacagtgaaacacagtattcaggatgaatatggtttgtgggggccataagccatctactttatcttcctgcagtggagaatgtctcatagaaataatgaaagtaatcctgaactggtaaaatggaagattacggaagccttgactgtcagacagagtgtaaatttgatacattttagtaagagaagaatagaattaaaataatgtttaagtggtttagaaagattttgtttatttagttaatggactttattttttagatcagttttaggtttatagaaaggttgaatggcaaacacatagagtcctgtatcctcctttcagtgacatccctcacctaatagtttcccttgttattaacatcttgcatcagtgtggcacatttgttacaactgatgaaccactattgttaaattattattatctaagtctctcagtttgcattagctttgtgttatacattctacgaatttgacaagtgtataatgacatatatccaccattacagtatcatatagaatagtttcactgtctgaaacatcctcttgcgcttcacttattcatccctcttcccctccgccccttccctcccatcccctggcaaccattgatctttttactctctccatagttttgacttgcagaatgtcatatacttggaattattctgtatatagccttttctgactggcctattatacttagtaatatgaattcaagtttcctccttgtcttttcataacttgatagctcatttctttttattattaagtagtattcaattagatgaatataccatagcttttttatctgtgcacctatgggagggcatctttgttgcttccaagttttggcaattgcgaataaagctactgtaagcatttgtgtgtcagtttttgtgtggacatctgtttttacctctttaaagtaaataccaagaagctcaatttctgcatcatatggtaagactaattttaactttgcaagaaattgcctaacttttctaaagtggttgtaccgttatgcattatgcagtaaatgagagttcctaatactccatatcctcattagcatttggtgttgtcagtgttttagattttagctgttctaatagatgtgtagtggaacctcattgctgttttaatttcaattccctgatcacaaatgatgctgagcatcttttcctatgcctatattccacctatgtaacatctttgagtgaggtgtctgttcaggtcgttcacccatttttaaaatcaggttattcgttttcttagtgttgagtttcaacaattctttctgtattttggatgccagtcctttatcagatatgtctttttcaagtattttctcccagtctttgacttggcatttacttctcttaacagtatctttcaatgagcagaaatttttaattttaatgaagtttaacttaccaatttttttctttcatagattgtacttttaactttgtgtttaaaaatttattaccaaatccaggttcactatattttctcctttcttcttctagtattttataattgtttattttacatttagatcatgtttgaaggatagttgtccatatttttgggtctatttctgggctttcctgttccattgattaacttgtcaattctttggccactatcactctatcttgattactgtagctttacattaagtcttgaagttgggtaatatcagtactctaattttgttctttttcaatattgtgatgagtattctgggacttttgcatctccctgtaaactttagaatcagtttgtcgatatccacaaaataggatttggattggaattgtgttggatctattgatcaagttgggaataactggcattttgatactattgagtatccctatccatgaacatggaatatctctatttacttagatcttctttgatttctttaatcagtgttgtggttttcctcaaatagatcttctacaaattttgtgagatttatacctatttcattttatttttgaggtggagtctcgctctgtcacccaggctggagtgcaatgttgcagtcttagctcactacatcctccgcctcccgggttcaaacaattcttctgcctcagcctcccgaatagctgggactacaggtgtgtgccaccacacctggctaatttttgtatttttaatagagatggggtttcactatgttggccaggctgctctcgaactcctgaactcgtgatccacccgcctcggtctcccaaagtgctgggattacaggcatgagccactgtgcccagccacctattttattttttagtgtaatggtattatgtatttaatttcaaattccaattatttattgctaatatagaagaaaacaattgactttgtatattgaccttgtattctgcaaccttggtataagtcacttattagttccagcattttttgttgattctttgggattttcctcattgacaagcatattgtctgcaaacgaaagacagtgttattttctcctttccaatatatttagattttgtgttttttaaatttttcatttattttaattaattttcttgaggaagggtcttgctggagtgcacaggctggagtgcagtggcataatcatggctcactgtagccttgacatcctgggcgcaagtgatcctcctaccacagcctccctagtagctgggaccacaggtgcacaccaccatgcttggctattttattattattattattatttgtagaattgaggtctcatcatgttgcccaggctggtcttgaactcctgggctcaaacagtcctcctgcctgggcttcccaaggtgttgagattacaggctttagcaaatgtgcccagccagattttatttttttaattgtcttattgcattagctaagactttttggaatgatgttgaatggttgtgagaggggccatctttgccttgttcctgatcttagtgggaaactactttcctaccataaagtatattagctataggttatttgtagatgttctttatcaagttgagaatgtttcctctattcctagttactgagagtacagatgcctctcgacttaaaatgggattgcgtcctgataaactcgttgtaagttgaaaatgcattgaatatactatagattattggttgtttacctctgtgattgcatggctaactgggagctacagctcactgccactgctgctgcccagcatcatgagagaatattatactacatattgctagcttgagaaaataacaaaatttgaaacttgaattatggtttctactgaatgcatattgcttttgcagcataataacgtcaaaaaaatcataagtcaaaccatcacaagtcagggaccatctgtgtttatcatagatggctgccgcattttgtcaaaagcttttcctgcctctactgttaaaattatgatttttcttctcaacattgttgatatgatggattacattaactgatcctcaaatgtcgaaccaatgttgtgtaattagaataaatcttactttatcctggtgtataattcttttttacattgttggatttgatttgctagtattttattgaggattttttcatctatgttcattagacatattgatctgtaattttccactcttgtaatgttttcacttggttcgggtattaggttaatgctggcctcataaaatgagttaggaaatacttcctcttgaattttatgaaatatattatagataattggtataatttctttcttaaatatttgatagaattcactagtgaacttacctgggcctggtgctttctgttttgaaaggttgctaattattgatttaattttcttgataaatataggtttattcagattatctattcctccctctgtgagttttcatggattgtgtcttacaaagaattggtgcatttcatctaggtgactaaattcatgatcatggagttgttcatagtatttctttgttatcctgttttttaaacatttctttattatccttttaatgttcatgggatcagtagtgatagccccattttcacttctgatcttagtatatgatagaatctaattgatattttctctttttttcttaacctgtatatagtcttatcaattttattcatcttttcaaagacccaacttttggttttgttgtttttctctgttgattttctatttttaatttcattgatttttactctaatttttattatatgttcttttctgcttactctggaattaatttgctattggttttgcaacttctaaagtagaagcttagattatttatttgaaatctttcttcttttctaatttttttacactccttttgctgcatccttttaataagtatatagctttttatcagttgtattttaatttttacttagttgaaaatatttctaaatggctcttgatacttctttgattcatgtgtgtcatttagaagagtgttgtgtcatcatcaagtatttggggagtttcccagctatcgttctgttattgatttctggtttaattccattgttgtctgacagcatactttcctattcttttaaatttgttaaggtttgtacattgtagtctgtcttggtgaatgttctgtgtgagcctgaagaaaacgtgtgtactgctgttcttggatgaagtagtctataaatgtcagttagatccagttgattgatgctgttgttcatttcaattgtgccctttgtgatttttataatttttgacaggggatgttgaaatttccaactgtaatagtggattcatgtgttttcctttgcctcatacattttgatacacttttattaggcacatatacattaagacttgtaacgtcttcttggtgaatggacctctttatcatcatgtaatgtacctctttatctctgatcattttcattggtctgaagtctgctttgtctaaaattcatattgctactccaactttctattgattagtgttaacatgatacatctttcttcatttattttaaatctatctgtgtcttcgtatttataattggcttttttttttgttttgagatttctttttttttttttttggttagagatggggtctcactatattgctcaggctggtcttgaactcctgggctcaagggatcctcccatctcagcctcccaagtaactgggattacagatatgagccaccttgcccagttattataggcttcttgtagacaacatatagtttattgttcttttttttaaccattctgacagtctctatcttttagttggtatattcagaccattatatttaaagagattattgttatgattggatcaatgtataacacatttgttactattatcttcattgtctttattttttgtttctttaaaaaaaattcactctttttctgccttctctggcttttttttttttttttttagagatagagtcttgccctgttacctaggcagtgacgtaatcaaagctcactacagcctagaactcctgggctcaagcagtcctcctaccgcctccctgctgagtagctaggactacagacatgcaccactatgcctggctaatttttatgtttttttacagagatggggtctcactatgttgcccaggctggtggcgaactcctggccccaagtgatcctcccacctcagccttccaaagtgctgggcttacgaggtgtgagccactgcacctgtcccttttgtggctttgattgagcattttatatgattgcattttattttttatttttggagacagagtctctctcagtcgcccaggctgtagtgcagtgacgccatcttggcccactgcaacctctgcctcctgggttcaatcaattctcatgcctcagccttcctagtagctaggactacaggtgagccaccacaaccagctaatttttgtatgattgcatttttttccaattcacatatcaattgatcaattgtacttctttttttttttctttgctggtagccgttgattgatgctgttgttatttgcagtaaatatttataactaacttaagtttactttcaagtaaacctatgccacttcttgaatagtataaattgcttataacagaattcccaagccctctctcatcctttataacatttctgccattaacttcagttattcataaactaaaattactacaaacactattgcaattatgatgttgaacacaaagtgtcatctgtcaaattaataagaaaatattttatcttatatccacttattccttctttaatactctttttttctttatgtagatggcagtttctgactttatcaccttttctcctttctgaagaacttttttaaacatttcttgcaaggcatatatgctagcaataaattccatcaattcttgtttgtctaagaaaatatttttctttctcttttgaaggttaatcttgctgaatccagaattctaggttggtgggttttttcttttaacactttaaaaattagattcattttattctcttcctgtttgcacggcttctgcaaagtactcccaggtaattcttatccttgcttctttgtaggtaaggtttttgtttttttgtttgtttgatttttgttttttaattattattatttatttgagactgagtctcgctctatagcacaggctggagtgcagtggcgaggtcttggctcactgcaacctctgcctcctgggttcaagcaattctcatgcctcagcctcccgagtagctgggattacaggtgcctgccaccacacctggctaatttttgtatttttagtagagacagggtttcaccatgttagccaggctggttttgaactcctgaccctcacatgatccgcctgcctcggccttccaaagtgctgggattacaggcatgagccaccgcacccggcctgatttttgggttttctttgtttgtttgtttactttggcttattttaagatttttctctttgtctttgattttctgcagtatcaatatgatattcctcagtgtatttttggggggtatttatcctgcttggtgttcggtgagcttcctagatctgtggtttggtgcctgtcattaattcaggaaatttttcagtcattattgactgaaatgtttcttcttttcctttctttccttttttgtgtccctgtttatttatatatatatatatacatgtatatatatatatttattacacaatttgtaattgtactgcagttcttgtataatttttctgtcttcagtttttttccttattgcacttcttttttggaaattcttattgacaattcttaaagtttactaatgcattcctcagctatatccagtctactgatgagcctttcaaaggcactcttcatgtctgttaatagttttttattttgagcattttcttttcatagagttttcatctctctgcttatattaccccgctgttcttgcatatagtctattttttctattagagaccttaacatagtaatcataattattttatttatttatttattttgagacggagtctcactctgtcgcccaggctcaagtgcagtggcgtgatcttggctcactgcaacctctgcctcctgggttcaagtgattctcctgcctcagcctcccgagtggctgggataacaggcatgcaccaccacccccggctagttttttttgcatttttagtagagatggggtttcactatgttggtcaggctggtctcgaactcctgacctcaggtgatcctcccaccttggcctcccaaagtgctgggattacaggtgtgagccaccgtgcctggccttaatcataattattttaaattcctggtctgataattttaacatctttgccttatctcagactgtttctgatgcttgttaaatcttttcaaactgtgtttcagtcttttagcatgtcttgtaattgtttgatgaatgctggacatgacatatttggtaaaaggaactgaggtaagtaggcctttagcatgagcttttatgtttatctggctggaagctaggctgtgtttgctgtcaccgtacatgtcagaggctaaaatttccttcagtgtcctggtcttgtctcttctgttgtctatggattaccctagtgagttcttcctaaatatagtctgagatatgcagttctttctgttgaatttctctgtcagtatacgggagccatagtgatgtggtcgttagatgtgggagtagagggaagcgttcaatagtcctatgactagatctaagtcttttagtaaagcctttgccttgggctgtgacgttcacaagtgcttctcagtctcccctgccctttaagttagacgagatagctagaggaagccggaggccccctctcccacacggaatgcaagagggggctggagctggatttctctttttttaggccggttaggtggcagcagccctccagtcagttaggctctggtaaagtcgtttcccttgaggcaggcctgttacaaggaatgcaacatgccaagcatatttcaaactggctgcttttcttcttcctttaggttgcataaggggatttttttctagtttttactgtgaaaacctggtagtgtcctggagataaaattggggaagtggggcagtccttctatgactgggtcttcctggaatttttttttttttgagacggagtctcgctctgtcacccaggctggagtgcagtggcgtgatcttggctcactgaaaccttggcctcccaggttcaagccattctcctacctcagcctcctgagtagctgggactacaggcgtgtgccatcacacctggctaatttttgtatttttagtagagatggggtttcaccgtattggccaggctggtcttgaacccctgacctcatgatctgcccacctcagcctcaaaatgctgggattacaggcgtgagccaccgcgcccggtctggaatttttaactctcaaacttgctgacactgagcttccagcaagtcatcaattatgatttagattttctacctcctacagaggtttctgatttcctcctgtaaattctgtgtctcagcgtccacccatctcttcagttttggggcagcagttttccctatgacttcatttctctgatggatctaagaagagttgttgattttcagtttgttcaacatttttcctgttgggaagatgggagtgaggtgttccaagctcattacattccagactgaaaattcaaagtccacaatattttttaaattacagctttttattatagctttgggtttttaaaaaataataattgagaggaattttcacatgttgtacaatagcttttgattgcactagtagtgaatattaggttaagtattatatgattgatatgttgatattattgaaacgtttttccagagactgaggtgccactcaatagctattctaatgattgttgacctgtaatttcttatgttacatcctgtaattttaattgttattgatttgtaattctttatattacaccctgtgaggccaaggaaatactctttcacaattctccatgaaatgttttactacaattctctcttatttggctaccatttcatagataatcatcactcccgtctatgcctttctatctcagagcctccctctatttaatcttccatcagtttttaacaagttgatggtatttgatcatgagtaataatatatcttatttttcagaatctactccattctttaaaatctcttggataacccttttaattaaggcttttctttgagcctcgattccttggagaaaaggaaattgtcagaaacgacacacttctgtgatatgccaccagcaggcccattactatataccccagccttctctttgttatctagctaatgttaggctgccttgtttgtctaaacatataattatatttcaggaaaaggagaacataagtcttccgtactttatatcatgctgtgccctctaataatcaacaaataaaaacactgcttaataatgcttaatgtgtttggttttgtttattataggaggaactctctggaatgaaaaataaaatacaagtagttgtgcttgaaaacgaagggctccagcaacagctaaaatctcaaagacaagaggagacactgagggaacaaacacttctggatgcatccgtgagcattattttaaatcataaattttattttagtgtgaatattcccttctgccctctctcctcgccttcttcgctgcttagattttctccctgaagtgtggccaaagtactatgttggtatttgtttgagacctcaaatatcaaacttcactgtggtggaatgaatcctcagatgaaacgatcttgtgatattttgctacagtttcctctctgagcataccgtttctgccttaccatatggaaagagccggtctgaaagcaggaagtgtgttatacaggaaggactttgctaagtctagaaaccgttcagaactttaacttagatttctgttggatttctctaaattttccttgaggtctgaaatctaataagtctaattagctgcatgatgtagcagaaaaaatgttggccttaggatccaagaatcaaaatgttagtcttcccatttccctaagaaggctggtgtttagcaagtaattttagaaggttttacatagcttaatcacgtatgtcctttatttctttattggtaatttgagaagattaacctataccaggagttttcagtgcaaattcctggactccatcccctgtgagtctgattcacttggtctggttggcttctaggaatctaaactttcatcaagttgcctaagtgattctaatgtcagtggcccagagtttgaagaacgttgggtcagattatctctataattctgtgacagagaattattgtggtgacatttaaatagtgcttaaatcttatgacttatcagagtacttttgtcttaaactttttgtaactgttttgctataagatatagtcacagcttgttctgctttttgggacaaattcaactttccatgtggaagttttcatacttgcctattccagcttcactttgcagtttactttggtggttttgactttgtcgtcattagtaaatcagctgttaagaaaacatgaaagtcttgatgtttcattgggatatcctctaattttcgtttttgaagttttttttttttttaacttgaattgatagttggtttataatcctggagttgtatatgttagggtttgctattgagaagtataggagtgtattaactctgataaatgaagtgggctaattagtatttcagtttaattttctgcaattgcatttaagtttgtgatcagttcttttctcctcactgtataactttttcctgaagatttgtataattattagtggtaaaaactccatcttagttgcttatgattttaatgtcaatttgaggaagatatcaccatatagaaaatacttagaagtagcttattttaaaaatattcatttgcttttcttccaaacacgtggtcacttagcaagcagtgattcaattattcatagtcctcagtatttatgtaatgccaaagaagtggaagaaggggaagtgaagtgagaaaggaaattaggcagacaagtgaatcagagggcaagagaaatgagtaatgcaaaaggggaaggaaatgatggtcagagcacacatgccttgcagcatgagcaaagaaaatgtgctaaacaaaactacagtcagaatcatagaaaggataaggttttagagaggttttgttgttttttaaacattcatgtgagctaaatataatgcaggtattgaaatgattactgcagatatgccagatgaccttgatatctattttaatgttaatcttctgttatttgttgttgttgaattgttacccccacgttttacctgtgtaagtgaattgaaatatttcaaggccagatacagtgtcttacgcatgtaatttcagcagtttggaaggatgatcacacgaacggatggatcacttgagcccaagagttccagacaagcctgggcaacatagtgagaccccatctctctaaaaataaaaaaaaaattagccgagcatgctgatgtacacctgtggtcccaactactttggagactgaggtcagaggatcccaggaggtcaaggctgcagtaagccctgatcacgccactgcactccagcctgggcaacagagtgagaccttgcctcaataaaaacaagacaaacaaaaaaccagacatttcaataatacatgcatggtgctgtgttacaagttgtaacatgaataaaaatgtttaggatatcttaaatataaaaaatcaagaaatatcttcttttggggggaaggggtttttgtaatgagtcaattaaaatgttggtgctaaatcttcccttgctatattgaagtttgctgatttcaatatagattttcagtgtttcataatgccttttaaaaaagataattgaggtggccaggcgcagtggctcacgcctgtaatcccaacactttgggagaccaaggtgggtggatcacgaggtcaggaaatagagaccatcctggctaacatggtgaaacccaactctactaaaaatacaaaaaattagccgggcgtggtggtgggcacctgtagtcccagctacttgggaggctgaggcaggagaatggtgtgaacccaggaggcagagcttgcagtgagctgagactgcgccactgcactctggcctgggcgacagagcaagactccatctcaaaaaaaaaaaaaaaagataattgaaacatttatatggtgtattaggttctctcaaaggacagaactaatatgatataatatatatatatgaagggggtttattaagtagtattaacttattaactgacacaatcacaaggtcccacaacaggccatctgcaagctgaggagcaaggaagccagtctgagtcccaaagctgaagaacccgctgtctgaggtacaagaacaggaagcatctagcacaggagaaagatgtaggctgggaggctaagccagtctaaccttttcatgtttttctgcctgctttatattcgctggcagctgattagatggtgcccacccagattaagggtgggtctgccttccccagcccactgactcaaatgttaatctcttttagcaacatcctcacagacacacccaggatcaatcctttgcatccttcaatccagttaagttgacactcagtattaaccatctcatatagtaataactaacatttattgatgactacatggttataatgtgcgaggcactgtgtcaaactatttacgttatattacttcagatttgcagtacccacacaaggcaggtgttattatctctgttttcagaggagtaaattaaggtacacagctgttaagtaacctaagtaattggcctaatgtcacagagctagataatggcaaagcaaggattcaaacccaggactatctaattctctaaatacaccccgtagaaccttaaattataccgcctttctgcataagttaggaagagcttgtcgacattgaaccaaaccatctttgtttgcagaggatagaagttttccctggcagaaaagagaagaatctcctttttattgtctcctgcttgtagccctggactttgatggtagcctgtaagactttcaacttttggtctagtttatgacctagaagttaaagaagcaagccattcaaagtatatttcattcctgtcctgatttttcatcactttgccttctcataaaatatttcctcatggaaagcttttctctagagttcacaaaatcaaaataatacgaaaacatgttatttattcaacattttgtcatgtgtccttctttaaagatccaggagttttttcttaaggagaaaatttctcggccaatatttttcacgtttgttttcatcccctgtcttaccaccgctcccgccccccgatcccctgccacccaattaagaaatcaaaggttttgaatgatcttcaaggatttaacatacttaggtttttaaaaacatcttggttaagtagcattcaagttttttaaaactatctgtgaaagaacaaaatgtccgttagactagcaattctttccaaagaatgataatattttatatcataagttagtgatctgtggtctacatgctccctccaatttctccatagaaaattagtaccaccctccttcattgatctcaaaaacaactttaaatgcaatcatatcttaggggatttgactctaccgagagaatcaagtgcagactcattccatggtgtggtatactctcaagtcccttacttgattctttagcttcatcttctgacattcatcaccttatgttttgacgtctagtaatgctgaattttctgagacccccctgcaggcaccatgctattccatacctctgtgatgtttatcatgaggttctctcttcttcgaatgccctttccatctagcttacccttacttatccttcaagataccacaccagtgtcaatttttttctggaaaaccttccttggatttctgggtgcccttagtatccctcctgtgttttggcagaggcccctgtgcacacctttggcctagcactcacattattaaattgaaattacctgcctaggtgtgtgtctcccttattagactgtaaactccttggagctaagattgatcttgctcatttttgtcctccaagctcttagcacagtgtctgaacaccataggtgttacacaaatgtttgcactaaactgaacttccagaagaatataaaatagactgtcagagtactactttaggtgaatgtagtttaccacgttcgagcatgatgcgacactgcagtatgggtcagtgtctggggacctgtcctgtcttgtgactactaccatatcctttggcccttagcaagtgctcaataattatttgttgaattaaattaatatacgtattttaatccttcttgtacacataaattccccagatcattgggctgcttactacattgaatgttgagagggtgacagaggttgcaactaacaatgggtacactaaattcaactcaggcatgtttggtttgtttgataaattttgagccagtgtttaatagtgtttcacatgaaggaccagatatctggtaatatgaattttcactgccacatggcagtgattgactggaattgagtagtggctgcttcctttggatggtacacatttctgtggtttgtcacagagcctactcttcttcctttttgaatccctggcatgcaggctgcatgtcaactctgtttatcaccatacatgcactgtttctttttactgaagataaatatttttctggaaaggcagaagatcgtaataataaaggactttaaaggaaaaaactgttcctttttctcataatgcttctgacaccaaatgtttgggtttgttttctcctacacctggccattctctgtttctctgtagataccaactaggtgtccagtgattcaattcaattctgacactcactacacagtatcagacccacaggttaagggctcagtaccacatgactgcctgctactttagataccaactgcaaatagtaggtctcttggttatccacaattctgtctgatttgtctgtaaattggggattcctacaatcccttcctaatgtgtgataatttgctataatggctcacaaaattcagggaaacactttgcttgctattactggtttattattatataaaggatataaatgaacagccaactgaaaaggcacgtagggcagggtccaggctggtcccaagtagaagagcttctgtctgtggagtttgggtacaccaccctcttggcatgtggatgcattcgccaacccagaaattctctgaacttcatcatataggatttttatggaggttttattacataggcatgattggttaaatcaatggctgttggcgattaagtcaatctccagtcctttccccccttgaggtgggggagtggggctgtaagttctagtcttctaatcatggactgcagccaccagtcatcttattagcatacgaaaggatactcttatcaccatggagatcctaagggtcttagaagcacttgtgtcagaaacccgggactaagaccaaatattttaacgaaagatgctcctatcacccatgtcactcaggaaattacagggttttaggaattctgtgtcaggaaccagggacagagaccacatatatatttggattcagattgacaggtttcagattctagtgctgccacttattagccacttcctacctctgtgaccctcagctactctatgtgactcagtttcctcctgtataaaatggaggcaacaatgaaacctatctatcccatagaactgtaatgattaaatgagttaatatatatgacatacataaaacagggtctggaacatagaaagcagcattttgataaaaattattattagccatgcatttatgaaacatggaacatgaaagacaaactaagagagaggtgtgtgcttcaagagtatatgtcttcagaggagtaaagaataattccatttgttgaatgcgctgaaatctagccctctttgcccatatttagattactgcctgtacctgaaggaattttactttgcaacacttgtagaatatgaccctaatagcctgaaaatgtgaagtgattcttgacctgtagtgtagaagcatatgctttttcttttcatcataggtaagaataggtattttatttgtaaaatatgcatgtttatttaaagttgaattcagttgcagttactggcacattttattttagggaaacatgcacaattcttggattacaacaggtgaagattctggggtgggcgaaacctccaaaagaccattttcccatgacaatgcagattttggcaaagctgcatctgctggtgagcagctagaactggtgagtatttgggtgcttttctcttatacatcttttttttctttttctcttttgtacttttttaaaattctggtaaaatatatataacaaaatttaccattataaccatttttaagcgtacagtttatctgcattaagtacattcatgtcactcaatcataaacattatccattttcagaactttttgatcatctcaaacaaaaagtctggacgtattaaacaatatctccattcccctccctgccaacccctgatgacctctcttcaactttcggtctgtataaatttgcctatttcagatacttgacataagtggaattaaacaatacttgtccttttgtgtctggcttatttcccttagcataatattttcaaggttcattttgttgtagcatgtgtcaaaatttcaagactgaataatgttccattgtatgtatgttaccaaactttatccattcatctattgactgatattggggttgtttctatcttttgactgttatgaataattatgctgtgaacattggcatatgagaatctgtttgaatccctgtttcaattattttaagtatatacccagaaatagacttattggatcatatggtaattcttcattcttttttctttctgctcctcagacttgatcattttaattgtcgtttcttaaagttcatcaattcgtttttctacctgctcaaatctgctcttgaatacctttaataaattttttatttcagttattatactttttagctccagaatttctgtttggttcctttttataatgtgttttcctgattttctttagttctttgtccatgtttgtctcttggctctttgagtgtgtttaacacagtcattttaaagtctttccccagtaagtctgatgtctgtggtttctcgagcgtagtttctgtcagcttatcctgttcttttgagtgagcatgttttcctgtttccttgtattccttgttattgtgttgttgaaaattgagcatttccctattgtaatgtgataactctggaaatctttaactccttcttttctagaatttgctgtcttattttacttttgaaggctgtaatactccttttgttttgagacatttccatactatttttgtgaagactattccatatcgtgtgattattgaagtctttgttctattagctcatgttcagctaatgtttgacagagatttccttgaattccaggagctgaaaacaaacaccctccactccccccaaaaggtggggggggggagagagagagagagagaaagagcgagagagagagagagagagaacaacccacctctcccagtcttttcagattgggtctgtgctgggacattcttttcccatttaaccaggcttgctctgagcctagggatcagccataggtgaaagcttacagtcttctcaggatgtttctgagtgtgtatctttcctaggcatactgtgactttctaaattcccccccccccccacagctgcctttgaacgtcctaatttcccaaagcgtcaaaaacaattctattttaagactaaataatacttttcaatccttttatgtatgtaacagacgtttattcttctcttgctaacctgaagtcttctttgcattaaatttgacatgtcagagttgatcaacaatgatgaaagagtgagattaacactgtaaatggaatgttccaggggaagatagaatgaatcatagttcaggttctcattattatccacagatgatatagttttctaaagattctttctgcccagtcaccctctcctgtcttagtccctaatccaagcttcattctacttgggaaagagtatccttcttcaaaaaagaaaattggaaagactaagtaaattgtatcttttttttccctatctgaataatttacagtagctacttaatacctataggataaagaccaatgtctcaagtcatccacaatttgcgtcaaactaatgttcgaactagtttcacactcttctcctgtcttttgttttttgtttcttgtttctttttgagacagagtcttgctctgtcgcccaggcaggagtgcagtggtgccatctcagctcaccacaacctcggcctcccgggtgcaagcgattctcctgcctcagcaccccaagtagctgggactacaggtgtgcgccaccatgcccggctgatttttgtatttttagtagagacggggtttcactatgttggccaggctggtctcaaactcctgacctcgtaatccacccgcctcggcctcccaaagtgctgggattacaggcatgagccactgtactcggcctcactcttctcccgtcactcttacaaatcttatctgtaggcatgcagaccactcaccagttgctgcttcataaatttataatccactttcatttctctttgaagaactggctttggtttatgcagtcctccctccccaaaatgttcccttcttaccctctacctattgaaatgtttccagtcttcagggtatagttgaaatgcgccctctcattctgctttcccgaatagcatgttttctctcttcccttttctgcattagaattcctttctcttttatgcctccccctagcactgtgtttatgactattggagactcatcttttttccttgtttatgaaaaaggtcaatttctgcatttgtgtgctctacctcacaagtgtttttcactttttccaagggtttcattctgggacttttctttctcttgtatcttttccctatcaatggtttattctttttattttatttatttttttgagacgggatctagctctgtcacccagggtggagtgcagtggcgcaatctcagctcactgcaacctgtacctcctgggttcaagcaattcgcctgcctcagccacccaagtagctgagactacagtcatgtgctaccacacctggttaatttttgtatttttggtagagatggggtttcgccatgctgctcaagctagtctcaaactcctggcctcaagtgatccaccatcttcagcctcccaaactgctgggattacatgtgtgaaccactgcacccggccaatagtttattcttagcagaatatattctttaatagctcccataaagcaaacaaacccaaaatatattctcctgaccctacattcacttccaactatcaccctacatctacattctccttttcataccaaactttttccaagcagttgtctatatttatgtctccacttctttacctcctattcttgcttcagtatgcttcagttgagcttcgtccccctgtagtccaccccaactgctctttttttttttttttttttttttttgagacggagtctcgttctgtcgcccaggcgggagtgctgtggcgcgatctccgctcactgcaagctccgccttccgggttcacgccattctcctgcctcagcctcccgagtagctgggactacaggcgcccgccactgcgcccggctaatttttttttgtatttttagtagagacggggtttcaccgtggtctcgatctcctgacctcgtgatccgcccgcctcggcctcccaaagtgctgggattacaggcgtgagccaccgcgcccggccccaactgctctttttaaggtcattaatgacttccagccatcagtcctcattgctctaaacctagtagcagctttgtataacatgtacattggttgattataccctcctcctttatattttctaagacacaatttaacataacattcagtaaagtacacaaaacaaaaatttacagctcaaagatttatctgtaaatgaacacctatgtgattatcaccactttatgcttcctcctagttactgccccttcatgccattaaagctaatcatgatcctgaattttctgaaaatactcaagtatgcatcattaaacacttttgagttctgttttttcaatgttatataagtggaattgtatagtatgtattctttgtatctggtttctgttgtccaccattatatttgttagattcatccatgttgttacattggccgaagtttgttcattttctttggtgggtctgctatatgaacatatgactttatccatctgctgtcaaggaacgtttgtgttgtttccagtttgcagctattgtgagcagtgctgctatgaacattctttcatctgttggtgtgtatgacacaaatttacgttgcatatgtatgttggagtggaattcttgctctcaggatatgtctgtgttcaacttgagtaggtaatgacaaccttccaaggggttttatcagtttacactcctacccatacaaggggttttatcagtttacactcctaccagtagtacatgagtgatacctttgctccatatccttactaatcatatagtattgtcaatttttctggtgaacttatagtgctatcttgtgattttcatttgcatttccctaactactagtgtgattgagtattgtttcatacatttattgtccatttgatgcctcttctgtgagccgcctattcagatatccttcttattatttttattaaggtatgtatctgacatatttatttggggagttctttatatattctgaatgcaagccctttgtcagtatacatattataaatatatattcccactctgtggcttcgcttgtaactctcttgatagtttgcttgcttgctttgatggctagaacttcagtttgttttccttaattatgtagttgttttttatgtccttttaaaaaagtttttttccaactacaatcatgaagctaattcttctacatagtcttctagaaattatagtttcacttttttttttttttttttaagacggagtctcactctgtcacccaggctggagtgcagtggtgcgatctcagctcactgcaacctccacctccctggttcaggcaattcctcagtctcaacctcccaagtagctgggattacgggcgcatgccaccatgcccagctaatttttttgtatttttagtagagacggagtttcaccatgtcggccagactagtctcgaactcctgacctcaggcaatccgcccgctttggcctcccaaagtgctgggattacaggcatgagccaccgcaccctgccttttttttttttttttttttttttgagacagagtttcgctttttttgcccaggctagagtgcaatggcacaatctcagctcactgcagcctccgcctcccgggttcaagcgattctcccaccacggccagctaactttgtatttttagtagagacggggtttcaccacgttggccaggctggtcttgaactcctgacctcaagtgatccacctgcctcggcctcccaaaatgctgggattacagatgcaagctaccatgcctggcctatggttttactttttgcatttagatctacaacctacctggaatttatttttgtatatggggtcatagtttgttcttttcctatgtgtttatacatccaagcaccatttcttggaaaggtagtcctttgcctttatgatagtacctttctcctaaataagttgtccatatatatttgggtctattactggactgtgttttagttaattgtgctaatactatactgtcttgattgttatagcctgaaatctggcagaccaagtcttccaacattgttctttatcctttggcctttagcatttccaaatacagttcagaattgtgaagttccaaaagtcatttgggattttgattgagatggctttaaattataaattataggtcatttgagaatcaacattttatgatattatctaatccttgtaaactgcatatcagtccacttatttgagtcatctttaatttttgtcaataacctttcatagtcttctgagtgaaggtttcatacatctttcattagaattattcctgactttttattttttatgctatcataaatgacacatatcttccaaatttttattttctaactcctaattgctagtatagagaaaaacacatgagttttgtattttgattcaatgtcactttcttttgattagtgttagcatggtatatcttttccctccttttacttttaacttttaacctatttgtatcttttttgaagtgggtttttatagaaagcatatagttgggttttgcttttttatccaatctgacaatatttgcttttttttctccctccccacacaaaggcagggtttcgcttttgttgcccaggctggagtgcaatggcatgatcttggctcactgcaacctctgcctcccaggttccagctattctcctgtctcagcctcccaattagctgggattacaggcacatgccaccacactcgactaatttttgtatttttagtagagacggggtttcatcatattggtcaggctggtctcgaattcctaacctcaggtgatccgcctgcctcggcctcccacagtgctgggattacaggcatgagccaccgtgcctggccatatttgctttttaatttgggtatctagaccactgacatttattgtgattatttatacaactcagtttaaatacaccatcttgctatttggcttcttctttacctatctcttatttgttcccctttacctctttttctgtcttctttgaattaatttttttttttttttgagacggagtctcactctgttgcccaggctggagtgcaatggaatggtcttgactcactgcaacctccgcctcccaggttcaagcaattctcctatcttagcctcctgagtagctggtaatataggcgcatgccaccacacccagctaatttttgtttttgtagtagagacggggtttcactatgtttgccaggctggtcttgaactcctgacctcgtgatccgcccgccttggcctgccaaagtgctgggattacaggcgtgagccactgtgcctggccatgaattaattatttttatgattcccttttgcttttttttgttggtctgaaaaaaatctttagtaccagtattcacttgattgctcacttcagaaacccaggattatttttagtgtatttttctcccctatatctattctgtcataaaattctcagtttttctcttaaatatttctatactaaatcctttctttttagttcctactgcttgattgcttttgttcatgtgcttatctcttacctatgtatttgtaattactggtttccctttcttcacacttcaattatgatttaagactcaattctgataaaaagctttcagtggccctccagtgtttcttctagagggaaagtgcaggagacatgtgtaccaaataaaagtcttgatatttttattcttcttgtggcccacctttacctattttgcccatctccaatcacctctccacctcacattttacattcctgtgatactgatctacttactttccaaacatggtttggacaacctctgtgccttctgctctactggaaattatccttcaaatcttaacatttcctctgtgaggccttctttacttatctttggctgaattaggagttcctgcctctctaaatttttcagtttccatatacttcactagagcaatttatgaacagttggcccttgaataagataggtttgtattgtgtgggttcacttatatgtgtatttttctgaagaaatgtaccagaattttttttgagatttgtggcaatttaaaaaaacttgcagatgaaccatgtagcttagaaatatgaaaaaattaagaaagaggtatgtcataaatgaataaaatatatgtaggtaatagtctattttatcatctactaccataaaatatacacaaatctgttataaaaagttaaaatttttcaaaacttatgtacactatcacagactgtacacggagtcattctcaggaggaatgcaaaaaaacataaagatgcagtattaaattataacagcataaagtaaaatgtagtacatactgtactactataagaatttcataaccacctcctattgctattgtggtgagttcaagtgttttgagtgtctgcttaaaacatcatgtgacaccagttaatctctgcataaacagtttgtctttccagtaaattgcatatcacagtaaaaagtgatctcttggtggttctcgtgtacttttcatcatgtttggtgcaatactgtaaaccttgaataacaccatgaggcccatgcaaagtgccactagtgatgctggaagtgctcccatgaagcaaattcatgacattacaggaaaaagttacattgcttgatatgttccatagattgaagtctgcatccccatttcaagtctgttgccccatttcaagataaattaatccaatataaggaccattgtacaaaaagaaaaggaaatttgtagagccatcactgcagccgtgccaacacgcacaaaaactttgtacttttgcacaatgcctttttatctgtcatggaaaatgcagattttatatgggtacaggatttctataagaaaagcatacctgtagactctaatataatttgagaaaaaaaaaagtcattttatgacaacttaaaacaaaaggaaagtaaaggatataaagctggagattttaatgccagcaaaggatggtttgataattttaggaagagatttggtcttaacaatgtcaagataacaagagaagcagcttctgttgaccaagaggcagcagacaagttccaagatgcaattatgaaaattatttaggagaggctgggtgtggtggctcacacttgtaattccagcactttgggaggctgaggtgggcggatcacctgaggtcaggagttcaagaccagcttggccaacatggagaaaccctgtccctactaaaaatacaaaaattagctgggcatgatgtcacgtgcctgtaatcccagctactcgggaggctgaggcatgagaatcacttgaacccaggaggtggaggttgcagtgagccaagattgcaccagtgcattcgagcttgggtgacagagtgagaatctgtctcaaaacaaaacaaaacaaaaaaaaggacgaaaattatttaggagaaatgatatctgcctgaataggtttttaatgcagatgtaagtgctctactctgggggaaaaaatgtcacaaaggacatttattagtaaggaagagaagtgagcaccaggatttgatgccggaagggataggctaactctactgtttcgtgcaaatgtactcaggtttatgatcaggactgcccttatctataaagctcctaactcacgagacttgaagggaaaagataaacaccaactgctagtcttttggttgtgccacaagaaggcctggacaatgagaaacctttttctacactgatttcattgatactttgtccctgaagttaggaagtaccttgccagtaagagactgccttttaaagttttttgatattgtacaatggctctggccacgcagaaccccatgagttcaacactaaaggcatcaaagtggtctccttgcctgcaaacacaatgtctctaattcagcctcaagatctaggcagtcataaggacctttaaggcttattacatatgggtactctatggaaagcattttcaacacaatggaagagaaccccagtagcaagaacatcatgaaagtgtgagaggattacagcattgaaaatgccattattgttgtagaaaaagccatgaaagtcatcaaacccataacaatgaattcctgctggagaaaactttgtccaaatgtggtgcatgactttataagatttacaacagtcaatcaaggaaatcatgaaagagattgtggatgtggtggaaaaggttgggagtgaagggtttcaagatagagatcttggagaaattcgagagctaatagacaccacacaaaggacttaacagaagatgagttgatggagatgagtgctcctgaaccagtgccagaaaatgaggaagaagacatagaagaatcagtgccaggaaacaaattgacatgagataatctggcagaagggttctgattattcaagactgcttttgacttcttttatgacgtggacccttctataatataggcactgaaactaaagcaaatggaagaaggatagatatcatatagaaacatttttggagaaattaaagagcataacaaagtgagacagaaattaccacgtgtttccataaagttaactaagtttgcctgcctctcctgccttccctcctaactcctgcatctcttctgcctctgccatccctgagaagacaagaccaacccctccttttcctcctccaactcagcctactcaatgtgaagatggtagggtgaaggcctttatgaggacccgcttccatttaatgagtagaaaatactattttcttttccttatgattttcctaataacattatcttttctctagattgctttcttgtaataatatagtatgtaatacatatagcatacaaaatatgtgttaattgtttatattattgttaagtcttctagtcaatagtaggctattagtaattaagttttgggggagtcaaaagttatacatggggccaggcgcagtggctcacacctgtaaccccagcactttgggaagctgaggcgggcagatcacttgagtccaggggttcgagaccagcctagccaacatgatgaaaccccatctctactaaaaatacaaaaattagccgggcgtggtggcacatgcctgtaatcccagctacttgggtggctgaggcacaagaatagcttgaatccagcatgtggaggttgcagtgagctgagattgcgccactgcactccagccttggtgatagagtgagactctgtctcaaaaaaaaaaaagttatacatggatttccaactgtacaggggtcaatgaccctaacctccatgttatttaagggtcaactgtaattgaaattcttcatttttctattcctttctgggatatttcgtaagttccttgcagttcaagccaccttcatcttagatacacaataaatatttgttgaatgaaagaataactggataccaacagaggcttgtaggagttagtctatcatcatgtgatataaaactttacttttgatcattcatctagcacatatttattatatgtcaaatattcaacagccacaatgaaggattctaataagatttgatctttgccctcatggaccttatgggttataactgtttttccccagagtcacacttttagggataagacctgatatatgcaattttgaaagacaaagaaaatcaattttatgactcagcggttctttgcaggcattcacacaataaaaatagaaaaattcaagtggactagggaaaatattttctaagaagacatgtttcccccacgttgggtaaaaagaaaaaaattgagtttaatattaaaaattaaagtttacttataaaatacaggacatagagaaaaatgtacttctatttttcttttctataggagaagctaaaacttacttatgaggaaaagtgtgaaattgaggaatcccaattgaagtttttgaggtaaagtgaaatcgtccatttatagtcataccaaaagcataatgatcttaaaatatatttgaatgtttgctgaacttctagttttagtcattatcagacttacttgatgacattttaatacactttaaaaaatttcctcagattattaaaggatgaaaggcctaaaattgagttcttttccaaatcacgttcccatttcttcatcagttgtaaaatatttgtgttttcttgtagaaataagaatcacggccgggcgcggtggctcacgcctgtaatcccagcactttgggaggctgaagcgggcgaatcacgaggtcaagagattgagaccatcctggccaacatggtgaaaccccgtttctactaaaaatacaaaaattagctgggcctggtagcacgtgcctgtagtcccagctacttgggaggctgaggcaggagaatcacttgaacctgggaggcggaggttgcagtaagctgagaccacgccactgcactccaacctggcaacagagtgagactccatttcaaaaaagaaaaaaaaaaaaaagaaataagaatcactaactgctcttatagaaattatgatattcaagtaaaataatgaaaataaagcactttagttttcaaattattagtattttttctctgtagatagtcttcatctaattttaaaattgcaatgataatataatagtttgagtatttgtatacatgatgaatttgagtatatatgatgaatattcatgtactttttatagaatctatttattagagatcccagtaagacctatatattatagattaaccattagtgatttatgtataatgagtagaaaaagacagcaggaattaatatttttgttgttaaagattatttttaaatagtagtaatgaagtaattttaaatcaaataaactttgaaatattgtttataattttattttaataagtccaatttgaaattttaaaatcttccaggccatagcctatctagagacataactagagtaatactaagagccagaactcagctgattgtggtggcttacgcatgtaatcccaacactttgggaagccaaggcgggtggatcatttgaggtcaagagttcgagactagcctggccaatatggtaaaaccctgtctctactaaaaatataaaaattagctgggtgtggtggcacacatctgtagtcccagctactcaggaggctgaggcagaatcacttgaacccaggagatagaggttgcagtgagccaagatcatgccactgcactccagcctgggtgacagagggagactccatctaaaaaaaaaaaaaaaaaaaaaaaccgagctggaactcatagctttcactgtacatggttgtttattttttaaatgttcttatgtttttcatagattaccctgattagttttaggatttctcttagagatttttacttttttacaaagaaatgttaacatttaaaaaatactctaatttttgctttcttgttttttgtcctattttattttattttgattttatttacgacttgattctttagtttttaaagtgatgtatttctagatcattgtacttaagggaatgtgacttattttgtctcattcagaatccagatatttcatctttaattacattaaaataccaacttgtaatgaattagactttgttctctgaatccttctgtttcttcattttcttttactataatttaagattatttaaagaggcattttcataaataaataaaatcagtcttcttttcaactttctttttaactttctcttttgccatttctagtaaccaaatctacttgagtgttttgagtttggagctgaccaaaattagtaatggggaccctttgactttggaatgtgcttcccaagttctttttataaagcctttgaaagtcagacattccctacatgatattgaaaaagaaaacttatcatcttggtgttattattttggggatagggtagacgcagctcatttttcttcccctcaactttggaatgccattccaaagtttttttttaacccttagattgcctgtgggtcttttatgcctctcctgcgttgcttgaaagcccccaaaatctcaacagttgtctgacagccaggctgttggcttctcctctgtgacagtgagccagttaagatggccacagcacctgagcgtggagactttgacaatgacaacagagagtagacagagatggagataaagttcctgccttcagtagtctcatttttcagctagaaagtttttttttgttttttttttttttgaagtacaaaagaaccatctaggcaaggaagctcagttgccaaggtgactttagcgcagctttactgggataaggtaggaaaatacaacccatgtactagtcaattaatccttaaaaagtcaccttggagaaaaacctcatccagaggtgagctgataaagtaaaaacaaacaaaaactacacccacacccacaccacccccacccccaccattccccagccctttctttagcagcctgtatgtttccagctaatagctactacccctgaaatcttatgactggcaagttctatgtaacttccttctgtaacttactttcttttgaaacagatctttgtagaagtttgtcgttagataattatctatctaacagtaatgttttcctcctgaagaaaaatgggcagtaataaactagtcaaggataaaaatccatgtttttttatgtgaacttttaagacactctaaaaattttaagagattaatgcttgaaatagggtattttcctcacctcaagtatgttgtcttatattaccccaccccttttttaaggaaaatgatttgggatttatatttggagttttatttttgttttgtggttaatataacattaatggaggttggatcctgggacaagagagccagtgtcaggcggattctaatctatattaaaatcttacaagaacctaagctaattatgtaatttattccagtctcatcatattcaacgtgtcaattagaatcaccacaccaaagtttcagggtcgtggtaaaaattaataaggtattggacgtaaactaaagcataaggtgagtacccataaacgatagtagtagttaacattatgatgattcattttaaagtcatgtaattttacctggccattttctagaattttttcaccctctttttaggaacgacttagctgaatatcagagaacttgtgaagatcttaaagagcaactaaagcataaagaatttcttctggctgctaatacttgtaaccgtgttggtggtctttgtttgaaatgtgctcagcatgaagctgttctttcccaaacccatactaatgttcatatgcagaccatcgaaagactggttaagtaagtatgcttctacgcgcacggagactttggcaatatggaaaattctgcctttaaaggggcattgtgttcttctagccctatgctaagtcacatgtgattattgttaatcttcaaatacagtggattttaaaaggttccttcattatagcttccttgaagacaaatgggtgggttctgccatgtcaccatgtcactttgaacagaaaccatgccactttgaacagataatagtatctcttggtttcagtccatcttcaagtgagagaattgaactagacagttctttacgattctgtccagttctatgaatctatgattacaaatctaatactattcttagcaaaactgagtgtaatagaaattcctttggttttgccatatcttggatttttctgctgtacttcaggtagaatgagttattaccacatcttcatcatgtgtctgttgtaaggagtattataaggacacactgtatcccactattgatatttgagggttaactgagaacaagttacagatgaccttttgtgttgtccaagttttcgtctaagctgagtgaaacaattctcttcgtacatctgttttgttgttttcactattccagaggaggccttttcctgtgaaaattttattctgtggaaattgagaattattatgtaatatagaacccagtggcagtttatagtgtatgttcttccatgcccactacttttctttgtgctcagtgtcacctctctctatctgctgtgctcacttaaataaccccagatcacttccttttagaagaagtctctcatcagctctgccccattttgtcctcaactgacttaggttcctttcttctgtggtcattaaggtcagaccgattttgctccatgtcctgaccttcaacaaattccttttcttctctgagcctggcatcttctgttgtttggaggaaaatacctgcttcttcagatttaagacctttttgggattttactaaggcaggttagcctgtgaccagaagtactgcttttgaaactgactgcttgggttcatattctggttctactgccaacttaccatggaaccttgcaaaagttacttaacctttttgtgcctcaattttctcatttttaaaatggtgacataagtacctaactcatagagttaccttgaggggtcactagagaaaacctatatagtacttaaaacacttcctgacatatagtaaatgctcagtaaatattaaaaccattctgtaccttctatactcccaagaatgatcaatatgtcttctagctgtgatttccacacatggctaactcactcaggttgggggtgagttgctgttgttttcgagttggggtctcactcctttgccaaggctggaatgtaatggcacaatcatagctcagtgcaactttgaacttctgtgctcaagcgatcctcctgcctcagcttcctgagtaactgcggacatgtgccgccacacccagctaattaaaaaaattttttttggtagagatggggtctcactatgttgcccaggctgttcttgaactcctgtgatcctcccacctcagcttcccaaagtattgggattatagacataagccaccacacctgacctaacctactgattgttatatgaacatagaatttccagtgtggactgactggtagttttttatgtttgtttgttttgtttttgttttttgagacggagtctctctctgttgccaggctggagtgcagtggcgcaatcttggctctctgcaacctctgcttctcgggttcaagtgattttcctgcctcagcctcccgagtagctgggactataggcgcccaccaccatgcttggctaatttttgtatttttagtaaagacggggtttcaccatgttggctaggatggtctcgatctcttgacctcatgatccacccgccttggcctcccaaagtgctggaattacaagtgtgagccaccacgcccggcccgactggtagtttttatgacctatactgcttggttctgtttttgttaagtattttaagtattcaatatgttgttaatttattcatatagtctcaatataactattaaacatgtattaactattttcagatacaactaaaaaatgtagtaaacatttattatatgtcaacgactgtgctaggagatttaagaacatcatttttaaaaatcttcaagcgttcatgaggtacatattattacccccgttttatagctagggaaattggggttcagagaagttaaaaatttgcctgtttatatttgaaaaacaagaacagagctgtaccttacaaaaataaattcatggtagtttaaaggctcagatacaattcagactataaaagcattagaaataaatataaaaaatatcttataattgtgggttatagtcctaaggatgacgtgaaaagtggaagtcataagggaaaaaaagatacatttgtttctattaaaaaataaattcccttacaataaaacattacatattcagttaaaaggctgagaaaaaatatttgcactatacatgacaaaagaccaatagaataaatttcctttgaaacaaacaaaaaggacaagctgcctagttgcaaagtaggtaaagaatagaaatcagtgagcaataaaagaggaagatgtcagcatatgaaaatgtatttattctattagtatttgaggaaatacaataaaaaaattaaagaacaacccgtcagactgacaaaatagaacaagattgataatttcaagagttggtgaggtcatgagtacacaagtattttcactctgctggtgggttcataaattggtggaaatactttggaagtaaattagtcctgtccattcatattcaaattgtgcacttcacttttcaaaatctaccctcaagaaaaaactcaagtacatgcataatggggtatgtatagggaatgctttttgcagcattgtttataattatgtgaacaacctaaatatcgttcaaaggagagtaactaaacatggtttagataaactatgtcattttgtgcatagtatgaaaaacggaagtagttctatgtgtattaatgttggaccatctccaaaatatattgttgcaagaaaacaaaacaaaatggctaaagataaatctagtatgaaaccttttgtattttttaagtccatatacaaccatactacatttttccccttcgaggttcatagatatgcacagaaaaatatttgaaagtgtaaacactaaatatttaacagagataaccactagagaggtggacgaaggcaatgaaattgaaagggtgtcaaataggcctttaacaatattggtaactaattttgcaaggagaatataatttaaaaattaattttagaaagaggaaagcatattaaaagttgcaaataaaaagaggcagagcttaaaactaggtagtctagcaaaactaataagccaggcatagtggctcatgcctgtaatcccagcactttgggagcctgatgcaggaggatcacttgaggccaggtgtttgagaccagtctgggcaacatagggaaaccctgtctctacaaaaaatttaaaaattaaaaaaaaaaactcagccaagaaataacaagttattatgttgccttttatattatccttctagattatgaaaaaatatttttaaaggaagctataatgttttggttacttccaagcctggcagtcattcagaaattaagattcttgatcagttatgtattcctttgtctctatcctaaatttgagctcttagcctcttaaagtaaatgtcaacctacttagttcaattttctgccttgtcagcatatcattgtctcatgttctgcattaatgacagaaaggatattaaacctattaacactgagcggattctgcttttattgtcaatgaattcttcttctgtatcattctcttggcctaacttaactaatgcagagtgctgaatattgagtgctatgctaactttgaagagtgtccagcaccttttgggtttggatttctagttttatgtatagttagaagcctgccccctccataagctgttatcatattacctgaatgactttaacatggaatgtttaaaaatgataccttaaatatgataaatcaaaagtttccttgtaaatgtggtattgtgacagcagctttcagctcctttgttgcatcctttagcatttactattttgaatatatattcatgaaacaagaatggcttgatggccaggcatggtggctcacacctgtaatcccagcactttgggaggctgaggcaggtggatcagttgagatcaggagtttgagaccagcctggccatcatggtgaaaccccatctctactaaaaatacaaaaatagctggatgtgttggtgcacgcctgtaatcccagttacctgggaggctgaggcaggagaattgcttgaacctgggaggcggaggttgcagtgagccaagattgcgccactgcactccagcctgggcaacagaggaagaacctgtctccaaaaaaaaaaaaaaaaaaagaatggcttgtacagttgacaaggaggggatcaggcatgacttggagaccaggccacccatatgtttctggtggtttcttaggactcaaggactttttggagaatatacttaacaactattgatgacattggatatattttttatgttgatttgaagtcttcatattgtttccgacctttcgcctttcacttggcctctttatgccataagggaggtaagagtaacagtaacctctttttcttgcttaatgatcaaagtaccttcacatggtaaccaagatggaactgcttaaattcctttctgtagctcacagtaccttggagaagtttatacttttcaaaaaagagaaaagattccaagggtacttttctggggctttagtccagcttgtgattttggagtggatcattggcctgctctgcatagctggctttaaaagactacagcaggaacttcccagaaatgaggaacaaagaaatgttgtagtcagccttctagactttctttttaaaaacggtgtagtaacacttattagtgatacctaataatgcttaaaattaataataactggagtaatttagaaattataagacatttcttagccactccacatttcaaggtggagctcatgcatatacattagaccaactcttttgcttaaacacttggctgagattgttaagggactttctcagtccttttggccctgattgctgcgctaagtttcttaaatattacatgctcattagtgcgtgtaagtacatgcttttcaccccagaacactcatgatctttacgtcatctttctgcctcagctgctctttcatctggatcatggaatgttgcagggttaacacagtgttgctggctttgcgtcaagaagctccttgattacattcatcaacacattcacatggtgtttccaagcactcatagaacatttgccatggaggatggtaatttggagaactgccctttcactctcacattgatatgccacatgtgtctgtacagcttcccattgtgagagcctcattcaggtgtggctctgggctggacctgtggattgcgggatctagagcaggactgtagctaactgggcagttaccctgggtggctggaatcggctgtttctgaaaggcagattatataagtagcactgttagtcccaggggataagtgggctaaaaaatgaaagctcagacaagatgaagccagatggccacaggaatggagtaggaagcaaggccttgtgttgaggagaggggactgccagcccagagctctttctaaaaaaattatttgtggggttgcttgctgctatttgttatgtggactggctgagtcaaaacaaaaccaaaccaaaaccaagatttagtaacacctgagtgaatgagtagataatcctaaattgccaaaatgactacctacctgcaagcttcccaggtgggctcaaagctaccttgaagcatgcgttgcatttgccttacagaaaggaggagtgtgtcagcccagtggttacgtggagtttgagtgtaatcgttttgtggtctcactgttgaatgatgggcctaacaagacatctgtatattggagttttatctttgataattttctgtggttccatagtctaaatttggtgagttaatattctgaaacacttttgaaccagaacgactgaactctagtttctaattcaaaataggtaatgttttcagtttagatcatgaaatattagaactgagagggagctttacctcacctcttttgacaccatcctatagcagactctttattcatttatttgttttcttgttgtttattctgttgagcatctactgtgtgacaaacactactcttgacaagaggatattctgaaaagagataaagtctattaaacataagtttcccataagcagcaagtttgttagatttttatcctgttgtggatctgtctgtttgcatacttataaacactgagcttttttgatcattcttttttgagatggagtcttgctctgtcacctaggctagagtgcagtggcacgatctcagctcactgcaacttccacctcccaggttcaagcaattcttgtgcctcagcctcccaagtagctgggactacaggtgcgcactaccacacccagctaatttttgtatttttaatagagacagagtttcagcatgttggtcaggctggtctggaactcctgacctcaagtgatccgcccacctcggcctcccaaagtgttggaattacaggcgtgagccactgcgcctggccttttttgttcattctttttccttggaactttggctttggtgactgcatggtatcaggaacagataagaatctcattgaatagttacttttgctcttcattaagtcttagtgatttaagaaaggtgactgtaagatgcctatattgacttgctgtccttaaagagtgaatttttcttttcttttagaatcatagatcctaactggattgcatatccttgataaagctagaccccttttacgttatagaacttttatggaaatgcaaatagacacatattcaattttgctggtgtttatttttttacttaactaggataatttaatcttgccttgattcttccacttttttacatagtaattgtgtttgattatattcgattaaaacaatttacttcttttttcatttccttggaagaaaaattatttttatcaatttaaaacaaatcaggaaattctaaagtgaagatcactctgcttccatgaattttatatttgcagcaacttattcttttttaaacaaaaagggcttttatgaaactgctaataattgtaactttgttcagtattacatgtttcttcaaatgtggctgctttccaaataccacaaatagtttattttacctttaagagatgttttaaattgaatcattggttaattctgaaagtaattcaagcagagtttataatcctctacactatgactctttaaaacttgctaattaaaaaaaaatcatagttggcccttttctcatagtttagaccttggcaatgaaaaggaaactgcaagcatttatttcaaatgaatttgaaaccgtggtttagtcttcaactctttaacaaaacagggaacaccatatgtaacagtccagcatacattttttgctttttatgtcttgaaagtttcctgcctcactttctctttgtctactggatatttttattcagttgataaattgcaaatatcctagaatattttatatgggacttatttaatcaatgagattgtatccttgctattttacatgccagagcattttggcatttggttcacttctactcccaataaacagcttaggatagagtacttctgagaattgctgaagaagggtgggtcttggcaatgatcaaacccagtgggataagattgtgttaaattgtgaatgttatatgcatagccaggagattggaggagttcaacagtactaatcattgagcaacaacaagtgttcataagtaactgaaagaatgtaattgaaagagaagtgcaaaaaagaggattgtggagaaagataaaaaggaaaggacatatatttgttcaagtaaatgagaggagaatctgctgcatggacaaagcctcagtccttccttaaaatgttgactgctaccttgatttacaattcgtaccttccctactttgctgcatttttccttttcagcacctccccccacttttaaaaaactaatttgctcttctctgggctttcccctgcagccctctccacaatagatgattgtcccgcacagatgccgtcctgccacgaaggctcttagcctttctggctgctccgcccgccgctcgccaagtgaggacagagggtctttctctggggtgtgctttatttcatatgtgctcagccggcctaccctggctcttctaatacatattaatgcttttctctccctgacttatgaggacaggatcgtttgatcatttcttgttttgaatgttctttttgtgctgacagagaaagagatgacttgatgtctgcactagtttccgtaaggagcagcttggcagatacgcagcaaagagaagcaagtgcttatgaacaggtgaaacaagttttgcaaatatctgaggaagccaattttgaaaaaaccaaggcaagtctaataagatgcaaataaaagtgtctttcttttttttttcttttttcttctgagtatttatttggttattcttctataactaaactttgtttttcaaacacacaaagtgaattatcaatctgttaatgttgacttttctgaattaaacaaatttgctatttggagaattcttactgctctgcaaatactgttgttgtatcactgttcagagaatgtagtacagtataatactttgagagacctatatgcttaatctttttatttgctgataatttgcaatgctgcaaaaatcttaacacccaggcattagtttgtatgtgttcgtatatgactaaagacaaatgtttttcctcaataattgggaagttttgagaaaatccaaatataccaaagacaataatatatacatatttagtagcatttttttttttttttttttgagacagagtcttgccctgtcgcccaggctggagtgcaatggcacgatttcggctcacagcaacctcttcctcctgggttcaagtgattctcctgcctcagcctcccaagtagctgggattacagacacgggccatcatgcccagctaatttttgtatttttagcagagatggtgtttcaccatgttagccaggctggtctggaactcatgacctcaggtgatctgcccatctcgtcctcccaaagtgctgagattacaggcgtgagccactgcgcccggtcttagtagcatctttgagtctggacttactgtaaggtaactcaaacatacttaatgagaataacagtttatacttagtgatcggacggtgttataggcactttgaagaataggaggttactgttgattcattactgtatttgggggccacaccgtaatccgttaaagttgcatgtattttccctagacacactagcatacaattcaagttcttaatggccacgtgtagcaaatattggacagtgcagatatagagcattttcattatcatgaaaagttttgttggatagcactggtctaaaccatatatgaatctcagtgttttattaaaatattagggctacattactgagtatatgcccagaggaatataaatcattctgctgcaaagacacatgcatgtgaattgtcattgcagcacccttcacaatagcaaacgtaaacgatggaattgatggaatcaaccgaaattgacggaatcaatctaaatgttcatcactgacagattgtataaagaaaatgtggaacatggacaccatggaatagtatgcagccataaaaagaatgagatccgatcttttgcaggaacatgcatggagccggagacagttatccttagcaaactaacgcaggaacagaaagccaaatactgcatattcttacgtataagtgggagctaaatgataagaacttatgagcacaaagtaggaaaccacagacagtggcatctccttgaggatatagggtgggagcagggagaggagcagaagagatcactattgggtactgggcttaatacctgggtgataaaataatctgtataacaaaaccccgtgacatgagtttgcctatgtaacaaaccttcacatgtacccccgaacctaaaataaaagttaaaaaaaaattagggctattcaattctgcattaagcctcttgtcagccattgctatgtccatttgtctttatccagttcatccataactcttcccgtttgaccctcatgccttttgaaacttaggttcagttatgaccaaactccccaacatactgtttcctcagactctcctgtttcttcatttgttgtgagctctagctgtccctcaatgccatgtttcaaaaccttcagtgaaggcccttgtgtcagtcaagtcgtctcaggtgggtgtgatggaggaaaccgcagttacttcactcctgactgccatttccagggctttgttttggcacttactctcaggtcctattcctctttgaaattaagctaccgctctgtgttaatctgttttgcattgctataaagaaagagcagagattggtaatttataaagagaagtaagtggtttattttggctcatgttgtgcaggctgcatacgaagcatggtgccaacatatgcttctggtaaggcctcaggaagatttcactctgacagcaggcagaggggagcaagcctcacaagggagcaggactgagcgaggaggagaggggccaggccctttctaacaatcagacctcaggataactaatagggcaccaagccattcatgagggatccacccccatgacccaaacacctcccaccaggccccacctccaacactggaagtcacatttcaacatgagagatttggagaggacaggtatccaaaccatatcacactcctctttgaaatcagtgttgtctctctcctccctaatcaataaaatctctcaattgagaaggctctctttgaccctttctattttatttttatttttattatcatttttttgagacagagtttcattcttgttgcccaggctggagtgcaatggcgcaatctcagctcactgtaacctcagcttcctggaatcaagtgattctcccacctcagcctcccaagtagctgggattacaggcatgcgccaccatgcctggctaattttgtttttttagtagagacagggtttcacaatgttggccaggctggtctcaaactcctgagctcaggtgatgcacccatcttggcctcccaaagtgctgggattacaggcgtgagccaccgcgcctggcccctttttaaaagttttaacatctgatccttttcctcttcattctatctctttcatcatccttaaatgtttgaatttccatgttgctgatacacaaaacactaatactcttcagcttccttaactctactatatcccctacttctacgctaacatcctgcatgaactgaaatgcccctaagatctctctgaaaccacactctctgactagggcctttgctcttctttcctccctatcaaagttaaatctactccatgtcttcattttcacctctagttcttcagcattctttctttttatctctcattttatctgttgtgtccaggctggtcttcttttcttcccatttaaacataaattttaccatctcaaattgaactcacacattcactctcccaaatctgctgccccttctgtattctcttactggatggcacttttactcactaacatgctctgatcagaaaactggatttcaccctgtccttcacccctaacttttaaccagtcactaagtacagatctgagtttctaacgttttcttgaattctttccctcattaacacttttcttatggaagctaagtaatctctggatttatctattacacttcttcctagcttgcctccctccttcgttccactccctacactgcagccagaagcgatctttcttaaagacacatttgatcatgtgactctgatttaaaattcttcggtgaattttcactgccttcaagacagtctccacattctttcccatgcccgtggtctgtcctaatgtggctcccttttgccctccaaggctgctgcttttttcctcctctcgcgccctgtctcccagtacactcagctatcgtcaaaggcaggagggcttagggggtgaacatgggcttactagagttagccagacttagattcaacttctggccccaccattcactggctgtgtgaccttggacgagttactttaacttctctgtgccccagtttttcctcatctgtaaaatggagaaatatgtgactcctaggattgtgaatgaggactgcattttaaaatgtatattggttatcttatacaaacccaggcaggcacaaaatatttctcaataaatagcggtggtggtgataaccctgctgattatcccatcctctctccagcctctgagtctttgtatgtgccatgtgcattcttctctgctccactgcctgtatattactttagccttacttatcttagcctacatggtactccctctaggaaacctcttatctcttctgtctagattcgatgtaccctttatatgcctttatagcagggtttttcaaccttggtgctattgacattttgggctatgtaactctttgctttggatgctgttctgcacattgtaggatgtttagaagcctctacctactcaatgctagtagcttaccctcctcccccaagttgtgacaactgaagatgtctccatacattgccaaatgtcctctggtgggcacatttacctccatttgagaaccactacttatatagcatttatcaaaatgtattattattgcttgtttgtctgtatccttcattaaacttttaaaaaaatatttcagcttttagttttgaaagaggggtacatgtgtaggattgttacatatggtggacccaggtattgagcatagtgccccataggtacttttccagcccatgcccccctctctcctcccccaagttgtctgcagtgtctgttgctgccacgcttatgtccatgtgtacacaatgtttagctcccatttataaatgagagcatatggtgtttggtttcctgttactgcattactttgcttaggattatgtcttccagctacatctatgttgctgcaaagcacatgatttcattcttttttatggatgtatacattccctggtgtatatgtaccacattttctttatccaatctgccatttatgggcacctaagttgattccatgtctttttttttgagatagaatcttgttctgttgcccaagctggagtgcagtggtgtgatcttggttcactgtaacctccgcctccagattcaagtgattcttctgtctcagcctcccgagtagctgggattacaggtgtgcaccatcacgcctggctaatttttgtgtttttagtaaagacagcgttttgccatgttggccaggctggtattgaactcctgacctcaagtgatccacccgcctccgcctcccaaagtgccgggattactggcgtgagccaccatgcccggcctctatgtctttgctattgtgaataatgcagtgatgaacatttgagttgatgtatctttttggtataatgatatatatcccttggggtatatacccaggaatgggattgctgtgttgaatggtagctctatattaagttctttgagaaatctctgttaaactttaaaattgtcaccaagccaagggcttgcttccctatgcacatagaagccaatgctacggcactggcttttaagaaaagaaaaggctttattgcaagttgactggcaaggaggcaagaggccacactcaaatctgtctcctcgttctgcggcaagatcaggaagattggtttcagaggtgtttctaagtagccccaggtgataccagtgcagccagtctgccagggtggtggtaatcacaatgaggaggttaaacctctcatgtaccccagaaatatatgcatctactatgtactcaacaaaaattaaaaataaagtaaaaacaattaggaggttaaagctttttcccattgcacatgcctggactacatgacttgcaattttggctcagtgctatctgtaacaacttaaacaatggttaatcagtctgcactagtcccttggttacaaaatctctggtgttacggaatttctccaccctgatcactgttaaatccgtagcatcttgcgtagatctcaacacataataaataggtactcagtaaatatccactgaggaaggaaattgcaactcagttctcactagcactctacagtgcctttattcttatctttccagcttacctactttgccagcaaaagtacccagtgaaaattaggcccaatcacacttttttttttttttaatagctagttcaagcctcccaagcattgctaaaggaagtcatttaacaaagccacttaatagccgggcgcagtggctcacgcctgtaatctcagcactttgggaggctgaggcaggcagatcacgaggtcaagagattgagaccatcctggccaatgtggtgagaccccgtctctactaaaaatacaaaaattaactgggcatggtggtgtgcgcctgtagtcccagctactcgggaggctgaggcaggagaattgcttgaacccgggaggcagaggttgcagtgagctgagatcacgccactgcactccagcctggcagcagagtgagactccatcttaaaaaaaaaaaaaagccacttaatgagttccactgaagagtaatactagtcaccttcagtggttgtaggtactgttgaacaattcttttctctgcagttgaagaccttatatactctagtcaggaactccactttcctcacttttccaactccactgctggcacgtcactttcttcggatgacctacttctcactttactaagattaggaccaactgacaagagcctcctcagcatcttctcatccctcgaatgtctcctctccttatttctcctttcttttctggccctcttatttcccaagatgaacatctttctccccgtttttgatgtctcccacttctatgtcatcacatttttcttgcatcctttatccttttctctccactgtttttccccctcatcctgcccacagcctttgtttaagtaaacaaaaagcagctttcctgtgatcatctttcacttcgtttattaccgtccattcctcatttcactggcagacatctcacaacagttgtccaccctggtagctttcctttcacttctgagtgcatcgcagccaggctttgaacaaactgtagcctgattttatgttactgaagtgctcgcttcatgatcactggtcacttcctgattaccaaacccagtgacctcatctcaatcctcattggacttaaactctatagatttggaaccctgttaactggcctatcataacataccatctctttcccttgatttagctgatatgttactctcatgggtccacattgtaccattcttgtctactcttaagtctcttttaacttgtttcttggtttccacaagtcttaagtgtggacgttcctcagagttagttcccagccctcctcccatgttgccttgacttcctgggattcatttctcctcacgtggccaaatattaccagtgaatacgcccacattatgcctttagctttaactgctctcctgagccccagccctacgtgttttgctgctactagatctttttttatggatgatacactgctggcgtctgaaactctacacaaccaaaccgttcattggctccgccttcccatctaccactccttttctttctaccattttctctatgatcgtcttcaaacaaaggcatcaccatcttcaccgcagtcctggcttgcattctttaaaacatctcggttcttccctatgcttgctcttgacattccatcagttcccaaggtctttctctctctcttcagagtcaaatttctatttaactatgcctaccttttcattcttataccactgccctggttcaaggcttcacatcttcacatgctttttttttttttttttttttcagagacagggcctcactctgtcacccaggctcagtggtgcggtcatatctcactacagccttgcactcctgagctcagctgattctccctccttagccccgcaaagtgctgggattacaggtgtgagccaccgtgtccagtggtatacttcacgtattcttataccaagtatgcagacaattacaatagctttctaattggtttccctcaaatttcatctaattccagcatacttttcacagtgctctcataacatttatagttcctgagttataaatctccctgtttaggtagctcccctcttgcagtagaataaaagacaaatctggccccattctaactttgctagtcttctctttcactctactctttcatgtcaccttcactgtttccagaacatgacctgcagttggccattttcattgatttgcacatgctgtatttttctgccttgtaataatctatgaagtatctgttcaatctatgaggctcaactcaagtggcagtcttcctgaagttttccccagccccttcttgtttgaattaacttctttttcctctgtattcctgttgatgtggtgtataattttggtagttgtttacacagttttctccaccagaagaccttgaaatcaggtctgtgacatctatcattgtatttcacacatgaccatttacgtcttaattaacaataaatgtttgttcagtggaagtcaattattattaatgtgaaatttgtaattaattttttaaaaaatttaataactgagagcaagcaacactattgttcattaggaatctatagcattttcagtaaattagtaataatgaatgcaaggacaaaatgtattgcaagtctagtactttttatctagaaggtatgttgaaacacactagaatttttgctttctaagtgcattaaaaagccaggtggtatacatattttaatttaaaacccaactacttatattactgagtgatgaaatggttacttggtttagttccttgacgtttgttgccatctagtgtggcatttgggtatcacatgctaaatagaaggaattatatatttacattctttgtggcagtgaaaatgcctgaggattttataagaaaataaatatataacttgagaagtatataatgccatgcaaacattcttgtgtggaactaccttggataaactccctactctcaccactttctaggtctctgatttgggcaagttactgaatgtctcaaagtaccagtttcttcaattgagtgataagaaccaattaaaatgtattgagagggttaaataatccatgtataccacttagcaaagtatctggcacctagtaggtgctcaataaatatttttgtttgaaaatggaagttatttcaattggtgataattttaaaagaggaaaagaattcacctgggactaaatggagagaaaaagtagaggcttgtgcagtcacaccttgataaaaagctacacgaagcagatgaaaaggttaaccaggccttaggcctgcctgcttgtgttggaagggaaattgttgagaggtatgtgtaaaggcctgaaggcacaggctgtggcatgaagttaccataagcatatctgtaatgatataaccctctaaggaaaaaaaaaattttcttttttactcataacaacttgaacaaagtatgtatttccaatttgctaagacctatcctgccatatatctttgtgggtaagtggtgtgaactttttaaaaaagttaattattatgtatacataataattgtacatatttatgggttacatgtgatattctgaagattagtttttaaaacagcagcctggtaggttgaacaaatatttacaaagactttttctcccttttcaaatatccaaattattctgtttcttggattacagggagtcagaaaggcaggaattagaaacctggattaaaaataaaatcagaaaagcattgactatttggttatagtcacaaggatagaaaataacgcttcttgatttgcacattatctgtcccaaaagaagtgtaaatatcttgaaaaatggtacatagggatagactgataaatttctggttagcaagggtttataaattaaaatcaatagtttgcattattcataagttagatgtttgaaatgtgttaatctttttaattttgtgggctttattcataaaaataaaaatgtttgtaagctttaaagtttatgttcaaaggtgtgagctgtatatttttcataagatcttaattccttagttatgaattattctgtcacaaagatttcttgaaaactaaccctagcagttgggaaggacttttatatgatctacaataggtttcctgttttaaaattttagttgactagatataaattttgttttcgaaaatattttgactgcctaagatagtagtgcctaccctttggcttaataaaaccaggactgggaatatcaagtccaataaactgtgtttgaaaaaaagtgttaatatgtcaacacagaatgaccacagctaaagaaatttcccagaaaagaaaaggtaccttcaggaatgagtctgctgggtggggggaatgtataattccccaacttctcaagacctacagccatttccaccaaggaaagggccgtgttcagggaaagggagagaagccaggacttgggaactactgagagaaataacagccgcaggccccaaattaactttgtcacctataaagatctatcatttaatggtaattgcctgtttatagcattcagttactataaaattataatttataattttatagaaattaaaattataatttataattttatagaaattaaaattataattataattttatagaaattaaaattataattataattttatagaaattaaaattataatttataattttatagaaatttataattttatagaagttaaaattataatttataattttgtagaaattaaaattataattataattttgtagaaattaaaattataatttataattttgtagaaattaaaattataatttataattttgtagaaattaaaattataatcatttgatgatagttgattgtttactgacctagcctttgagaagtcagttattatgtctttactgaatggttataggggtactcaatcgacagggattctgaaactaggagaagaaactctagaattaagagagagctttaatggagatagtgtataaataattgtttactagacccaaatcttttagtatgtgcggtccagtgtgagagagttatctttagaaagaataaatcatttttctgattccaagtgttactacgcttttctgttttcttcactgtgaccggacatatacgttaaaatcaaagcaaataaaagtaaaagctatttttgtttgtttgtttgttttgtttgtttgtttttgagatggagtctcgctctgtcgcccaggctgtagtgcagtggtgcgatctcagctcactgcaagctccgcctcccgggttcacgccattctcctgcctcagcctcctgagtagctgggactacaggtgcccgccgccacacccggctaattttttgtgtttttagtagagacagagtttcaccgtgttagccaggatggtctcgatctcctgacctcgtgatccgcctgcctcagcctcccaaagtgctgggattaaagacgtgagccactgtgcccggccttagaagctatttgataatatggaattgttggttacacgctaagagacatcagtaaccagttttttgtttgtttgtttgttttgtgtgttttttggggacggagtcacactctgttgcccaggctggagtgcagtggcaccatcttggctcactgcaacctccgcctcctgggtttaagcgattctcctgcctcagcctccctagtagctgggattacaggcacgcaccacctggctcagctaattttcatattttagtaggacggggtttcaccatgttggcctggctggtctcaacctcctgacctcaagcaatccacccgcctcagccttccaaagtgctgggattacaggcgtgagccaccacgcccagccaataaccagtttttaacctaatatttttattcagtgttttgttgcccattactcatcatcagccattggtggtggccattcctaatagagagaagaccatccacaaaaccaaggcctcagcagtggttttgtttacatgattttacagcttctcactttgtgcttttcactgtatcatcctatcttggcattacacctcttatcctgccaggattatttactgttgcttgttctttagttgactgagttctttgaattgattctgtaggtgcctttcatggtagcctggttttagatcttcagtctcttctgctgttcctatacttaatgatgatgactcctgagtttttgttcagttgaaaactttctgattggatatattggtttatattaagtaagcgttttgtctattcataccagtagcattcatgatatcagggagagttatgaacatttactcaattcatgtgaaatatttttcacaagagcaattacattttgaatcacaaaagtaactcattcatatttcaagctccaagggcttaaattatagaaaaagtatgccttttcatttattttaatatctaatttaaaatttccttttccaggcattctcggctggaattttgacttgggactaattccctagaagaatcactttttactcattgtatttgtttattagttaatctgagacaactgaattttacctttatattttatgcctgggagcatagaaacttttcagaagagaccaaaagaaactggagtttaatgctttccagatgaagagaggaaaattcacatatcctagatatttattgtctgtatttattatagctttcaccagagggaagcataactatgcataaaacttacagtgcttactaaggccatttccatctccattaaaatcaaatgtgactatgaaatttctaatcatacagcatgtaagtcacatgagacctggggttctttctaccatttcaggggaaaagagaggttgtgtgaggtggatattgtacataagggccactggaataagactataagatactatagtaccttacttttattaggatttttaaaaattgggattttactatgcaatctgtgtatgtaactaaattacatttgtaccccatatatttatacaaaaaaagacctccccaaattgggatttttgaagtcatatttcattattgggtgttataaataaagatattgtaaaagtggccaaaatgaagttagagattttttatttctggaaatgcagagtgggaaatttacagtaaaggacaatcatgaactttaccagaagtggaagatccttataaaactaagtagtgaatactgtcttgagtctttccatttaacttacgattattacataatttttacttcagttgtatgtttaaggggagtgaactaaattttctcttagttatatttaaggaaacttgattattatatagtattaaacaaaagatgcctgtgtgtaatgatatattcaacatttcattttagtattttgatctatcatttgaagtattccaataatttttatccatgagcaaataagaaatcagttaaattggatacttacgtatttcgtgtagtataaacatgatatataattgaaaatattagaacacttggtgtttctggttcccttttttaaaattctgactcatctgtggccgtcatcaaggttcattacctgaattttgtcattgattaattaatatggctttaatcatgaaaattgaaatatgtcaataaatgtaacatttggatactcttttaggtcaataagtggtattgataaacaataaaaaattattctaatgggctttatagtgagtttttgctattttaaatatacttaaagcttaattatgtcattttacctatattttttccaaattctaacctcctctttcaatctgttctatcctggcaggctttaatccagtgtgaccagttgaggaaggagctggagaggcaggcggagcgacttgaaaaagaacttgcatctcagcaagagaaaagggccattgagaaagacatgatgaaaaaggaaataacgaaagaaagggagtacatgggatcaaaggtacttaaggactctgctgttatccacattgcagaagaaaggttttttatgatgccattgatgattccataggctggagttcttgaatgaactttaaattttaaaatcgttattatataagtagttaaatttcgtataatttagaattcataaaaatgttttatcttttcatatatttctcaatagtttatgctgatcttttcaaataaaataatcagttagattccatacaatgaaattacaaaatttactttaaatcctgccattctgttggattccctctctcgtgtttcccagagtcgtgctatgaagatacccagattttatttcaaccttggctaaatcaaggagagatgacttcccctgcattatctcctacccctaaattaaatatgcagaagatgaaacacttgtaaggaactgagtaaccaagaaaaagtgattatgcactctgtatgaaatcagttctgacaaattacatgatgaataatgacggtaaccagatgaagggagagatttaaggcaaaaggaacagataacatgaaacaagcagtgtttgaaaaggagttcacaaactagaatacagagttgagtgggacctagctttaaaattgctaactagactcgaattgagcaagttgtggtccatcaagtaaccaaaacaactgtgttacatgtttgtttttaaaagtggactcacagcttgtactctaaatgctatgttgttatcagattcaatgtgtgataattaacttattcagtaagtatatactgagtatgtgctgtgtgcaaagcaatgtggaggcctaaagatatgtaaagagaaaaatcacaacttctgccctatgagttttaagtcttaataagagtaaactcaggcatttcctgtaaatgtccttgtcttcttatccatttttaaaaattgtgtctgtcaaaaccctactacctaccttctctgccctggattggtgatctctgctggtaaaaatcacacagccttgcagatgacatggctgtagactccaggtcttcggtgtccacggtcctttcagtgctttctagcagtcctcttttgccttcctctctcttattcattccacactcaacagatattaaccagaggggctgggaatgttgtagtcacaggaacgatgcagtttcctcatgaagcttacaaactcgtaggagaagtagatgttacacaaatgttttcataagtgagttttcgatcatcattgtgataaagccataaggttcggtttaggatatcgtgggaatgtgtaacaggaatctgaccttgtctaggcagtcacgaaagactttcctgagtaagagatgttgaaaatgagacctgaaagcattgatgaatggacaggtgaagaggggaagagggtttcaggcccaggaatataacacacccaagactctggacctggaaagcatcgcactttctaggaatttggagaaggccctgatgggtggagcatagagagagaggagcagagtagtgggaatgagtttggagaattatgttgggatggaatcatgaatggctttaaaatccatatgaaggattttcaattttgtccaaaaagggatggaaagccattgaatggctttgaatttgtcagtgtcacgatgccatttatatttgagaaaaatcattttgtcagtggattggaaggagaagcagaatagatgcctggagatcagctggaggtcattatcgtagtccaggtctggaggtgactcacagtccaggtctggaggtgattatcataatccccctctggaggtgattatcataatccagctctggaggtgattttcgcagtccaggtctggaggtgattatcacggtcccggtctggaggtgattattgctgtccaggtctgcaggtgattattgcggtctcagtctggaggtgattatcacagacccggtctggaggtgattatcgcggtcccggtctggaggtgattatcgcagtccaggtctggaggtgattttcgcggtccaggtctggaggtgattttcgcggtccaggtctggaggtgattattgtggtccgggtctggaggtgattatcgtggtcccggtctggaggtggttatcgtagtccaggtctggaggtgattatcgtggtcccggtctggaggtggttatcgtagtccaggtctggaggtgattatcgtagtccaggtctggaggtgattatcgtagtccaggtgggaagtgatggtatcttaaatgcatttctttaaagactgtttcaaatcacttgttcttctcaaattctctataataccatttttcctcttattctcagcagagagccttacttaactaacaaagaaaatggaagccgttgggtgatgaccacctcaactatttctcttgtccatgccttaaaataaattttcacctgtattccaacccagtctgaatgggaaaggtgtcttcctaatcccttccccttcccatggacctcgtctcctttcaccccctcaaggaactcattccatttgtttgttccacttttctgaatcaatctttccttcactacagtctctttcttatcctcaggaaaatattttcagatgtctcttactgttgaaaggaacaatctttcttctaatctgtggttcttaatttttggcacgcaagaagttctaaaaatctgattgtccaaacagtaccccacacccattacatcaaaatgtctgagagaagcatccaggtgtcagtgtgtttgaaactcacctaggtgattccaatgtgcagccaaggttggaaaccacgtcagtaattccatctccctctttgactctttctcttaatagtcgagtttcttgaaagatttgtccatacatgttgtctttattttgtcacctctcacttactcttcagcccactgcatttcaacttccatgccacagccagtgaaattaccattgctatgttcactgaagatctgtttacactatatttactgattttttttcagtcttattctccttaaaagattctctatgatttctttgaattcatattcttgatttgggagaatgatgatgtgtgctttttacattactctgagtttaaagtgcctttgagacaataaaggagacacatccagaaagcagcttgataggaggttctggagtttagcagggagctaaagatttaggtgtctttagcagtactatagcttgaattccatgtatatatagccttaggacctaaagcttcaagactaaagctatttgatttctagatccttaactgtatactgagctcccaaaccagctttactttccacctcctatcccagtggatccactatttatccagttatccagcacagaaatcttgtcacccttttctcccccgtctttctcaccccacacatctcatcatcaccaggctctaagacttaagcccctgagcatttacattgccttgtctctctatcctactgctaccatatctcatccttggatggttcctatagcccctgtggtgtccttgcctccagtctcacctccttcctatctgttctccaaactgcagctgggatgatctttctcaatatgtcagtctcttgctttaaaactcctttcacgtctccctgcaaccttgaataaaatttaggatcctttatcatagcatgaagactctacaatattgttcctctctttggctctccagtcttatgttccttcatttttcttctttgcaccctcaccacactgacctacttgtgcttccccaagcatgtacatatgcctctcttccatactgttttttccagtgcaggatattgcatgtgctttgccctctgcctagaggagtcttcctctgccctctttaactgattcttcagagttgtttgtttgtttgtttgtttgtatttgagacagggtctcactctgtcacccaggctggagctcagtggggtgttcacagctcacttagcctcgaccacttgagctcaggtaatcctcccacctcagcttcccaggtagctgggactagagaggtgtgccaccatgcctggctaattgtgttttttatagagacaggtttttgccatgttgcccaggctgatcgcgaactcctggggtcaagcaatgtaccctccttggccactcaacgtgctaggattacaggcgtgagccactgcgcgtggcccagaacttttcttggtaccacctcgtctccgcgcctcccatagctgaattgggaccgtctcctgtgggctcccatagctcacttcattacaaattcatgtcgaatagcttgcctcccctagttcagtgagtcccttgcatgtaacatcctcaatgcctggcacattcctctcatgtaaaatgtgctcagtatatattagatgaatgaaggaatgaattacaaggaaaagaaaaaagtccctatgccattgggaagttatggctaaaatgctgagagttcagaggatcagaactgattgtctgcaagagatcatggaaggctttggggaaaaaatggcattttcgttgagcttccaagaatagatggggtttagaaacgcagagtatgggggaaggaacgccacctgtaaccaatatgaataagacatggaagggagatgaagttgcgaattgagtgttgtgtgagagagaatggtatcaatagcaaacaccagctattgttcacgcctaggaaatttgtattttttggttgtttgctggaaaccatttgccttgctgagtagttctactgtgtagaagtatgttgatgagaattcctgataagaaaggaaaaacgaaggctgaagtgtgcctggcagtattccaggtgccttcatatgtaacagaacctctcttttactgacagttgtttcatgaataaaggtggtgacagaaatgcagcgcattttttatgtatcatttatttatttatttatttttaacttttagattcaagggagtacatgtgcaggttttttacttgtgtatatcgcatgatgctgaggtttggtttacaaattatcttgtcaccccctacataagcatagtacccaatagttagtttttcaacccctaccccactccctccctctcctctctagtcatccccagtttctgttgttgctatctttatatccgtgagtacctaatacttagctcccacttgtgagtgagaacatgcagtattggattttctgttcctgcgttaattcacttaggactacggcctccacttgcgtccatgttcctgccaaagacctgattccattcttttttatggctgcatagtattcagtggtgtatatgtaccacattttctttatccagtccattcttgatgggcacctaggttgattccatgtctttgctattgtgaatggtgctacaatgaacatgtgagtacatgtgtctttttggtaagacaatttgttttctgttgaatatatatccagtaatgggatttctggtagaatggtaggttctaagttatttgagaaatttccaaactgctttccactgtggctgaactaatgtacattccaccaacagagcagaagtgtccttttctctgcatggtctgttgttttttgagttttgaataacagccattctgactggtgtgaaatgggatctcattgtggttttgatttgcatttctatgatgattagtgttttagtctgttctcgcactgctataaagaaatacctgaaactgggtgatttataaagaaaagagctttaattggctcatggttctgcaggctgaacgggaagaatggctggggaggcctcaggaaactttcagtcatggtggaagggaagcaggcatgtcttctgtggttggagcaggaggaagagagagcagggggaagcgctacacacttttaaacagccagatcttgtaagaactcgctatcatgagaacagccagggggaaactgccccgacgatccaatcacctcccaccaggcccccctccaacatcggggattacagtgtgatgtgagagttgggcgggggcagaagtccaaaccatatcattcatgagtgatcttgagcactttttcatgtttgttggccatttgtatgtattcttttgagaagtgtctgttcatgtcttttgttcattttttaatggggttgttttctgcttgttcaattgtttactttctttatagattctggatattaggcctttgtctgatacataatttgtgggtactttctcccattctgtaggttgtctgtttactctgttgatagtttcttttgctgtgcagaagctctttggtgtaattaggtcccacttgtcaattggtgggttttgttgcaattgcttttgagaacttagtcataaattctttcccaaggcccatgtaggaaacacccggaatggtgtttcctaggttttcagctaggatttttatagtttgatatcttacatttaaatcttcaattcatctagggtcaatttttgtatatggtaaagggtaaaagcccagtttcattcttctgcatatggctagccagctatcctagcaccatttattgaatagggaatcctttccccattgcacatttttgtcaagtttgtcaaagatcagatggctgtatgtgtgtggctttatttctggatctctattcgatacaatacatatctgagctagagtcattgaagttgattttgtccctagtaagccctggctgacatttgatctcaagatcctgctctaaataaagatgtatgaataaagagctcacagtggtcctagcactgaggtcccagctctcaccaggaaatggcagaaagtggttttggagtaaaaggatttagagttgaatccagcttgacctttctgtgaccttgaacaattcacttaacctctctaagtttcagaggagtaaataaagttaataatacatcaagaattgataggattaagtgagataatgtttagaaaatatctaatataatgtctgacttaccgtgggcatttaataaattttagcttgtggctgttgttttagagaaagagagacggagccttcttggatagatttcttggcccttcatgttagtaaaagcagacagacttttatataaagcccagctttaccttttacttattagtttgaatgaacttgggcaagttacttagttttctgaatctcattttttcaaatgaaaattaattccatataattccttctctaggggatttaattattattagagacagggtctcactgtgtcacataggctggagtgcagtggtgtgatcatagctcatcgtatcctcaaactacttggctcaagcaatccccctgcctcagcctcctaagtagctaggactacaggcgtgtgccaccttgcctggctaactaaaaaaaaaaattgtagaattggggtctcattatgttgcccaggctggtcttgaactcctggcagtcctcctgcctcagcctccaaaagcagtaggattccaagcatgagccacagtgcccggcctttctaaggggatttaaagagagaatgcatatcacactgcctggcccaagaacataatgactgaccagttaatcataacattgtaagtgctaggcagttaaagttagtgctagaacaagaatctctgctttcctaactgtaggaatacttgtgaaacgtatagattttctttctttctatgttttttttattcctcccttacttttcttttttttttttttaaattccatttgtgtgggaagctgtcggagaacagatgccttctacctagacaggtttgaatcattccccatcaacagttcttgctgtgagtttgtgtgttatcttcaataatggtccttggtgttgcactgagcactcagctttgttacttcattcagtcattgatcatttatttattgagcaccccctgaggtccacacgttttctcaattgctttccttgacagtatccattgttaaaatccttaattcttgtatctcttgcatagggagtacagcttcataccaggttcaatacactagggactgctctgcagaaatttctatcagcctctcccaacctgggtgtccttgtctcttccttgcccctgtcaaagtttaaaggactcacctgatgtcaacgtcctggacatccagcagtgttgcagctgtgtctgtgttacttctggctctgcaacagatgtggatggagaagctcctgccgtgtaatgttgacttccagatggtgggtggggaggaaaagaaggtgtgacaacaggaggggagacctcagaaagtggggtgggcggcaggagggagcagacagctagtgggcagaggacctcagaaagtggggtgggcggcaggagggagcagacagctagtgggcagaggacctcagaaagtggggtgggcggcaggagggagcagacagctagtgggcagaggaagggaatgatgggtggcagagggaggaatcctaaggaaggggagagatttgtgacatgccttagaagagaaatggactagaatttataattagcaaaataaatgtcggtatatttacttcaaaaaccatacaatgttgtttaccatcagttatgtatgtccacataaataagtaaaatatgatttttagtagctggtaattaaagtttgttcctgtcatatggttccagaaaagctataattacacattcataatatatatgctcatgaactcgaaattttaaattgaaatgaaattgatatttttgatgttatatttaacttcttttcaaccttagttttatattgtaatgtgcccaagaatattttttagtttgttattagtaaagctaattgtatgtgaaaattagatttgtagacaatcctttgatgatagggatgtgtaaaaaaccataagtcaaatatgaaattctccactaccttcagaaagttaattaatatatctgcctaaattattttcatagggtcaactttaactagttctgtagttcgaaggcagacacctatcttcgttttattgatgtcaggttcttaatttactaaaactttggttcaatgttgatttttatcatagaattttagtaattgatttaagttataaaactgaattcacacccatgtcagcatacaatggtaagtttcaagcatcattatttaaaatgtgtcaccagttcttgttttaacagataaaaattgataggtattcctatatgttctgctgcttctacattttaaaaactgccagtacagtatgacattaagagcctagaagagtgacttcctggaaaagaacaaaacataattggaaaccagaaactataaaggataaatctaagatctagaaagcatttctaatcttgagaagaaaaactgagaacctaatatccatagagtccattggaaagccatttattctaagtatttactcattcatcaaatatttggtacctcttgaggaacttctactctaatgaggaaacagacaactaaaaacagtgggatgagtactgtggttgaggtacacagaggttgtggtgtgatggaggtatatatactgagattgtaggagcacatgccatagtgatattcaaaatattaatctttacagtgtgggaaacagtgagagtggacacaggctacaaacaacaggcatgactgtctcagtgcacacaagctgaatatcaaccctgaacgtgggaagggtcacctattttgtgctgggaactggagtcaaggaagacttcctagaggagaggagataatggctgagctgaaacctacatgagaaatgagggagaactagataataggggggcggttggggttttaccaacaaagggcactgcacagagcctcttctttgttggtttgcgggaagggtagtgggagccatagcagaccagttgctctctctaaagaacttcctccttaactctccccatcagtccttttataccttccatgtggaagaagggtttaagagttgtatgcttctgtatctcctctgaatttatttatggcactctgtttcataacttaattgggtgtttgataactgtcactttagggtttcaaccaaaaccttgactttatcatcttgttgtacatttttcaaaatgaggttagagatcaggggaatgaataggagagaagtacatatttcagttcactgggcataggtgaatagaggaaggagaaaaatgaacatacccaatccacagagaaatggctcacagagcccagtgactatgctgagacgctattaattcaagaaagttttagtatttgatttgtcaaatgacattattgtttaggacttttattttcccttacagatgttgatcttgtctcagaatattgcccaactggaggcccaggtggaaaaggttacaaaggaaaagatttcagctattaatcaactggaggaaattcaaagccagctggcttctcgggaaatggatgtcacaaaggtacagaaagagattttagtgtaatcgttacttaaggaaatatttcctttgaaaaatgttttcctaatgtacaaaactcttactgttatcaggaggaagtttggagtagaaaagttttgtgatttcaagaataataaaaggccacctaatggttactcagcaaacattcagttactacatgcagcccctcagtgggtattgcatgtgcaaggatgaattagacaccagtcatggccttgaagagcttaagggttaagtggcagagacagacttacaaataaataagagttatattactttaattattgaatatttgataaacctcatttttctaaattaattaagagtgctttgtttttgccgtagatagcataaggttggtgtttacaataattgccaaagacatatattgacaacttaaaaggtgtgcttgacataaaaaatcttccacttccttttccttttcagacttggtcattaaaataaagattctaatactacatgatcttattggtgcttaaatttatactttaaaatactacattgtctgtgctatgggcatcactggttcgtgaatcaagaactaaaatgtttaatggtctttactggcaatgattaagatacatattgtaagaaatactagaagtccatctagatttcaatagttaattgctttaaaactaagaaactaataaaatcaatttattttttaccactaaaaacacagataatttgcttaaaatactctttgcatattaccttttattcttcaatggattttcctaaattttgacatatttgtaatgccattgttgctctataattcagtaattaaaattaattttaacatgtattaggaaagggagccattttaccctttttcttgagtttctataattctccatttgcttttaaaaattcctattagctaatgtagaagtttaagaagctcaaatttttgtgtggagatagggtggaagtgaaggaattagttcagaaggatgggaatacttaacctagatttataggtgaaagctatgataagacagttttcagttgataatagagaggcagctttctgttgaaatcagtacagcagagagagagttctctgtctcaagaactagctgaaaggacatatacatcagaagagcgattagactaaatcgccttgaagttgcttccaacgtggagataacatagttctggttcaatttaatgtgttaatttatttgaaatagaatttgagtgctgtggataaacatagcaaatgctgaactgaaagtagtaaagcagggaactgtaggagtgaaatgaagggataaaataattttaaataagacctgctgcttaaacagtttttacataaccagcttgtattggtgttgggttttaaacatcatggttgtataattattatcttctgatgttatcagttcggggttttattccattttattcatagacataaatattaatagtgaacaattgagaaagaaaataaagtatggctcctcatttttttcctgtcactctgaatttgtaatttttatttaggtttaaaattaatagtttttataaatttataatttttgaaatcggaggaataaactctctcacattgaaggcatttgaacttccaatagaatttttaataacttcattattgttctagctttctgagggctactagggagaagcctgttgactttttcttctgtcttgtcactatagcttttaaacatagattaatttatttttaaaattacttttaaggttctgttttgtttgtttggagacaggatcttgttgtattgtgcaggctggagtgcagtagctattcacagacactaccacagtacactgcagtcctgagctcctgggctgaagccatccttctgcctcagcctccagaggaactgggactacaggcatgcgctaccatacccagcttaaatgcatataggttttataccttagtctattctaatacctcagtaatgatgaaactgatttctaaagtttccaaaatcattatttttggagaaataccaaatacttgaaaagttccaagaaagcataacggtgagataatatattaagagccatatatttgtaaattagaagccaacttagctgacttgtacattaattgaactttctataggttctcagttctctcaaaaggcccataatttgcttgtttagatttatctgctaattacacttttcaaatatatttccatttctgtagcagtcctagattcgaaaaaataaataaaacaaagttcttagtgttaagtatagaggatgatacacaacacttttaagatactatgtgtgttcattattggtgccgtattacaattatttcatttaaatgcatattttccttttatattgaatgttacagtcataagtgcatagtgtgcttagttccagtctatggcttttgccagaaaatcttccttaacttgaatacctcatattgtgtatgataagatgacatctgcaaaccttgcagtcaatactggatattacagacctagatatcaatagtatatctatcagcagacaaaaattcctttatacatttccttttaaagagcataactgatgaagtctttaaaagaaaactttgtaatatagagtgaatatttaactgtatcaatgtgaatgaataataacatagcttaacattttaactactaactttacctatttaaaggttagatgatagtgcattttggttgataatatgcaattgaaactgttatataaaataatcttgggcacattacttaaattccttagttatgcatttatttatctgtaatttcaagttgttagaatcaataatccctggtgttgcttctgaatcttaacaagctacgttgaatagtctaatagaaaatggcattcttagaaaagttttgttgtattttatctatatgacctctagggggcaccaaaagatctaattgcaggcattgcctggtagattccagcaggtaatcatccagttttttacaatctaacaggtgtgtggagaaatgcgctatcagctgaataaaaccaacatggagaaggatgaggcagaaaaggagcacagagagttcagagcaaaaactaacagggatcttgaaattaaagatcaggtaagagaggacacagcataattgcagcaattatagatatgagtaacattctttctcaagttgatgttgttttattcctaatttatttatttgtattgtttctaactaatgggatgatccagtttacactgttaggaaaatttcttttatagttgcctaaaattatcacctttcacatgaatggtgagaatacaacagcatgcatataaaattccaatctgacaggtcataaatatacatttggatatgtgtatctattacttacaaaagtaaaaagaaatgttctaatgcacagtttgaacctaaaatatacatacataaagttcttgaaagatgccaacttgaatccaattttaaatgaaaaagtttaaaattcgtaagatgagatgagttgatatgtaaatatgtcaatcaaattgattgttggcagagtgaaaccagttttaactaagataaccatgaatacgtttgttcatgaagcctaaatacagtgacattagaaatgttagtggataaaagctgcgtactttaatttcagtttgaacagatgttttatgttatatctttattgagatgaagtagataactccaattttagttgacaacatggataaagtttttagagaggcagttctaataggctgacttttgattttctatttttatgttacagtacaggaccttgaaggttttcattctttgtattcaatgaaagcaggttgtttattcaattaaaatagtaagactgggttcttagtgtcaatattttaaaataattgttttagaatttagaagtaggtcgctccaaataagttttttttcaaatatgtttctagttcgaggtttttcatcatattttccaacatattttctcttttgagccaatgaagtctttacaacaaatgatgcaaagacaattgggaaaagtattgaaaatgaaagtgataatgaagactagaacaaaaagcttttcaagtcataactgaaatccttagtactaaattaaaatcctggcaaccaaagtaaaattctgcttttgtaccactatatttggtgttgtaatgggttttacattttcagaagacttttaattattaacatgtacaaataatgaaacattttattgcatccagttgggggcgtgcctgatagtggaatggaaaatgctttctgtcagggactgaaggcctaggtctactaagtttatcacagataacttttctttcctgatatattgtaattttttaaaaaggaatcaatatattggcatacttttggcctttcgtattattctacagcattctgacagcataatattttggactaactgcaaaaatacatcaggaaagagtctcagttatttaaaattccattataattttctagaggaaaaaagatcagggacaataggagtataatatcacttgtaaaggaatacttgtttagaagcatttgcaatattagaagtatttgcagtattaaatctcattttaattaatccgtgatggtatggaggctaaagttgcaggatttacaaggagcagttttcatttgtaaacgttttctgataatagtgaaacaatagtagttttcataatgacgtttagtggtatgtttttagatagagatgtgcctttttaggaggtcacagctttaggaataaaacctctgaacagttacaagatgtttgtgatgtgttgtgaagtgatgtgcttgttaccatttttttttcccagacggaatgtgaggaaatcttataggtactctttttaactgttttgtattgaacagacagtttcagaaaagaagtcgtggtgtctcattccatggatgatttggagtagcaaagcagcaattgttctttggtctttcagccatgacctgaccttctgtctgtgagaccaaagaactactttgcttggccaccatctgcactcaagagagaaatttacatttaacttttaaaagcggggcatgttgagcatttatctgaaatacctacaataatataaagtagattaaatgtttaagtgttgtgtatcttacaattcagcatcacaagcaggctatctgtaggtttgcaaacaaggtgttcttcataatatagtcattttattcatattttagttcatctgaccacttgatacatttttaaagtgggtgggaaactgtgagattggaatgtgtgagaacaacagcttttttgatgtatacaaaatagggcaaatggttaaccaccaaaataattttccttgtgacctgagccttggctctggcataattagaaggaaaggttaggagagtaacaatggcagtcgcttccacccactttcttcttttcttctttatattgtgtcaggaaccgatgggcggattatccttcccatcaactcctttgtatctcttcagcttagagaattcctgtcagcctcagaggatgcttcttgcaccagaaaaagaggcatttggtatggaggagaatgtgaaatatgctctttgatttttatgagaaatttttttaggcaatggttatacacacacacacactcgatcaggggaatttaaaaacatgtatgagggtatagggaatattgtaatgagtcctcacatttccatcacctacactcatcattttgcccgtcctcttcctcagtcctattccatcactcatcattttgccagtccccttcctcaatcctattccatcactcatcattttgccagtcctcctcctcaatcctattccatctatctcacttttttctctctacttctgtcctcatcgtcaccttcatcttctttgtcatgttttttctgctccaccttctcatcttcatcttcttctgtcttcttcctctacctctttttcttcttttgcagaagtattttaaatggatctcagaccttatgttattttactcataaatacccatgtggatctatgaaggatatttttacatactatgtcattatcatacctaacaatgttaacaatacttctttaatatcaaataacacccagcctatattcacatttctttgtctcaaaaatgttgattttacagttggtttattcaaattaggagaacaagtatgtttttgtatgtccaattttctggtgttaccctttttaataggaaataaacagaactcttagtaaaatttcatctttctttgttgttgtctgttaaattttgtacataatgttttgattatgctttatttttataaaatgcctcattgtcattctaaagaggtataaattaatcctacagcaaagtatgtgaaggaaatggctaccacgcagcattcctgataatcatatcccaaaaggagcttcctcgcatccgaaaccccaaattcagcattaatttcacagccttgtatttaagatttggacatgttgcaggaggccctaacatgacaaggatgagctgacctgaaatgagtgatgcagaaatagagtttttttgtcaacttcccttttggtaaattaatctgagaagacgattctttatagccgctaacctttgattagggcccagtgcaaagtgaaaatacaggacccttttgttcagaaagcaggaaagaagtgatattaaaaagaactaaaatataaaacattttcctttcttcttcagtctctctctccttgcccctcctccctcaccaacccaggctggacatgcattttttttttttttcttttttttttttttttaggacggagtctccctctgtcgcccaggctggagtgcagtggcgcgatctcggctcactgcaagctccgcctcccgggttcatgccattctcccgcctcagcctcccgagtagctgggaccacaggcgcccacgaccacgcccggctaatttttttttttttttttttttgtatttttagtagagacggggtttcgccgtgttagccaggatggtctcgatctcctgacctcttgatccgccggcctcggcctcccaaagtgctgggattacaggcatgagccaccgcgcccggcctggggcgggaattcttacctccctgtccagctctaagatggcagggatgggcacacttgactcaatcctctctaaacacacattcaggattctgccaggggcaaaagacacaggagaacacacacctcccccagtgacatacgcacctcccccagtgccctggtcccaccctaggtggagggacccaccccagcagcagggcagggcgggatagaggaagctggagaggagtatatttctgagaactgcgtagggctgcagtgaggcagtggaaagatgagaccacatacaggagttcagtctccattgttccatcagagtacacctacaaaacacaattctagccgggcgtggtggctcacgcctgtaatcccagcgctttgggaggccgaggtggcggatcacctgaggtcgggagtttgagaccagcctgaccaatatggagaaaccccgtctctactaaaaatacaaaaaaaaaaaaaaaaaattagccggacatgatggcacatgcctgtaatcccagctactcaggagggtgaggcaggagaattgcttgaacccaggaggcggacgttgtggtgagccgagatcacgccactgcactccagcctgggcaacaagagcgaaaccctgtcttggataaaaacaaaacaaacaaaacaaaaaaaaaaaaacacaattctaagatacaattgctaataatttcaagacattgaccacagagtattaaactgcaagtgtaaggacccttctgaacagcacatgtgtgactgcactgatcacgtgcccaagaaactgccataaccagggggatgggcaaatggagattttgcatactaatatatgtgtatatatccccactcacatatacagacacatatgcatattcaatatgctaatgtgcccagtattcataaaaaagtgttagccaactacagctcataggtcaagtctggcctgctgtctatgttacaaataaagttttattagaactcagccatacctactcatatatgtatcacctattgctacttcctgcaacaacagcagagttgaggagttgtggtagagaccatatagcccacaaagcctaaaatatttactgtctgaccctttacagaaaaagttgccaatccctaccttgagtatagaaatacaactgtattttttaagtttcctctgacttactaggatgctgagctttgagtttgaagacccatgtatcttaaataataacaatggttttagagtattttgcagtataacaaatgtgccacatctttagtctcttaaaaatctaatggcattactcagcgagtgtatcactgataatcatggcattttcttattagtggcacatgacttactagtggcttggatgggagtgtaaataccgtatgattttatatttacaattttgtttttaggttggttccaattttatttttcagagataagaaggctgatatagaaagcgtctttctttttttttttttaccggcattgtataaattataattttggagttgtggctactactgagtagaaaacatcaagtttgaaatgactttaatggagcaatcaaagcaaatattcagggtggggtatctctgcaaaagaaatagatccaaaaattttggctggaaaaatgagggcaaaaaaggatttgagggttgctcatatctacagcagtgattcagcacttggacactgacattaaggatggagtgtaaggacacaggaattatcgcctaaattcagttgaattaactagactgttggaagaagtgcatctatattgtatggctttgtgtaaggagaagaaggcctgcctgcaagccctaaaagtcagtccttttttctttctttttttttttgagacggagtctcatactgtcgcccaggctggagtgcagtggtgcaatctcggttcactgcaacctctgcctcccaggttctagcaattctcctgcctcagcctcccaagtagctgggactatgggagcacgccaccacccccagctattttgttgttgttgttgttttttagtagggacagggttttaccgtgttgcccaggctggtcttgaactcctgagctcaggcaatccacctgcctcggcctcccaaagtgctgggattacagacgtgagccactgcgcccggcctatgtcagtcctttttaaagttagagaaatataaaagcaataaagaaaagttgaagaattgtaccttttacttagagaagacttcaacattgcttcacatcttcaaggatttgacaaattatttcaaggaaaaagttaaacacctgatttgagtcttcaatatggacagaacaagaacaaagggatttaactacagcaactacaaatcacaatagcctgaaacaagaattttctgacagtaaggagattgaaattgctgcaacaggccatggaaccttttccctggaagttttagttttaaatagtagcagcaatatgatttacctgaagacccagctcatggacctctgaggtccagtcttctatttgattctggaagcgtcctagaaagacatcgttgtatcttttaaaagtgggtaacagcagtgttagtcttttctacttgaaacctagcacttacagattaaagtaaaatcctgttccgttctattctctgctttgtgtctttaaagctgtgtactctttttcagaaggtttttggggaatatgctaagataatggatgacttctcaagagccagacttcagaaacttatccaactaccacctgcagtctcacttctccctctacaaaatgactgggagaggggccatttgggcctgcctttggtacatgtaatcactcggtcctggtgatgacagagttgctctccagtattcttcacaccctctttcagtctgtagacttagcacattcttgtccctgctccctacgaagacaacagcagttccagagggcttggcttacccagaccagtatgctagacactgtgggggtaataactaggagacccaggtcctacccttagggagtttatattctagttgaggagtcagagtacacattagaacatgccttaagaatacttgcaaagcagcatatcgacaagtgcaaattaatgtagtgtgaacttcatgctggctacagcccatgagagggagaatctggttccatgtgtgtgatgcaataaagcttttttatagcatcttctctaagtatgccctaaagcattgttcagcatacttagagaaatttgtgttcttatcgcagcctaaccaagaattctgagaaaattcttcagcctaacatatgtctaataaatcagcctcttttgttcttgtcctggatgatgcttgaatgggacaagtaggatttattggattatacaaataatttaaaatatgttcatttaataaaagtctaagttattgattgaacttatttttctaaaatgctgtgccaaattactttcttcatctaaaatcatcatgttggtaaaatcacaaaattagcagtaaaaaaatataattcaatttttctgcataaagaagcagttccaaatcaatccagtgaataataccgagttggagatcattggggcatttagcatttagtcacgttgttaatgatttaggcagttgttttctgaggcagggtatgtatacctcattcatagaaacactgacttttcaattaacatgctcaaaaaaagaatctattaatttctgcttgttatttgattttccaacaaagatgataatgctgtttaacataataatttattttacaaaatcaaatgtataagcagagacaacacatctgaaaatagcaatttaggtatatttagaagataagagtacaaataggaaataaaacaagctttcttagaaataatatgccttataggagaaacattaagaaataaatatttgcctttggatgggaatagaaaactgtaaactggactctaagaatattcctgtgtgccctgaagaaatataatgtttgctatattttcagtttcagtggatgacatgtgttttggttctttgaacatttttttgcatgcttgttttgactgtaaaagttgacttaccagccaactgccaacttgcaaagtgccttctcaggtaccaactctgcagttctggtagctaccaggtagtgacagttctttaaatgtgtccatgcagcccaacaagctgagagacattagacataagacaactacatatgctttctttttgtttatagtccagaaatattagtacctatatccaatataaatatcactaattactacatatgcatacatttaaaaaaatttattgtataaacataagcacattaacagaagccagtagttccatcacccaaacagtgtaaattgtttttatttttctgttttaccttccactttttgtacatatgcatctataatatttgcaaatataaatagattctagttttggtttttgcttttttcatttaacattatcttaagcattttttctgtgttgctccttattcttcatagtgatcactttactgtggccatttacatatacctgtaagggaaaatgatagtaagttagattttgagaacagccactatgacagatttagagcccttttgccctaaacttcatatgttgctttaattcaataaccatatattatgtgcactctacttagctataatcaatttctgtcagaaaggagtatgtaaaccaggtatgccaataaatatatgtcaaagagaacatagtagctatcagcaaaatgcaaaaggcatgggaatttgggaggggaaagataacatccttgcagggtggttagaatgttgcctagggccagccgtggtggctcatgcctgtaatcccagcactttaagaggctgaggcaagcagatcacttgaggtcaggagttcgaggccagcctggccaacgtggtaaaaccgtgcatctactaaaaattcaaaaattagccgggtgtggtggcgcgcgcctgtaatcccagctactcgggagactgaggcaggagaattgcttgaacccaggaagcggaggttgcagtgagctgggattgtgccactgcactccagcctgggcagcagagcaagattccatctcaaaaaaaaaaaaaaaaaaaaaaaaaaaaaaaaagaatgttgcccagcacggatagaagaagaaatttatttggttagaaggttcaacatggcagcttgagcaaaggaatgggggtgaaaaaggagggtgcatccaagaacatatgtgtcttttggttccatagcatttttgtataactgacctccattatttcaagtgccacttctctgttgtaatagattgctcatagaaaatgggttttagtaacactcagaatcccaatataattgtctccttgtaatatactgtatgccctgcagtcaggcacagaagtcatggtatcgtttgggaatgtatgcatatgtatttcatttgctttgtagtaggttttatgtaatggaaaaattttaagatttttcaaatttcagataacataaataaaatgtcattttatttacagtgttagagtcatataggattgttttcctagaaataaagaattgacaattatcttgatttgtggaggattagcacatgactgttgatgaaaggtgaaacacagatcatacagggtactactttacttaaggaccatgagtacaaagtcatgactttctgatttagcttttccagctaatttcctgagcaaacctctcagagcctcagtttatttcccagtgaagtgagaagcttggacaagtggtagcaaaagttttctccagctgtaaattcttgcatttctagaaacacaggaagtatttctttgcccctcttaattgtgaattaaatattcataaaatcaacagaaattgcatggagcctcaagttttattctgtattttccagttattcactttcactttataaacatgacacttttgttaagattataaaaatgaattttgactgtcatctgcaattttagacattttcgttatgattggtaatagaacaataaaatgtctagccttgtaaagagttaagtttacttacaagacagacatcatctaatttgcaacaaggattaaagccccactctgaattaaaatttctactggaaagatttgaggcactggcaaactgtcaaaggtagtattgtgcgagagtaaccagcttttgcaagacctgtgaaagtaaatctcttcggccagagtttcttaggtgtgtgaacttatgatgatcaggaatacattggtggattcccactagagaaacgcaccattaatagttaatgctttcactttctgttttcacttgttgccctcataaatgcaagcatggaatgaaaagctgtggtagttctggacacagatgacctagaatatgatcatcttaagattttgctctgggagttctttttaaaatcaatcaaaatgaaaccaaaaacaattttgcaattgtcttagaggttttacagatccctggcatgtttttctgaccctcactggagttcagtatgagacagaccacgctacaaagagattcctgatctaactctaggctgttcatgagtgttagacacacagtgtgagacagatcaccctacacagagattcctgatctaactctaggctgctcctgagtgttaatgagttgcaaggtgtttagagttttcatattactcttcttaacagatggtcaagttaatttaactctttttggtgttaacatctgtacttaagtggatttgttacacttacatttaggaaaaagacaagaaagctgcagggtctttatttctggcctgccttctgccatccctgaaaatttctggagtttcctataggaatggaaaattcttctttgtataaaatctctctacttacaactgaagtcctgataccttctctctctctctctctctctctctctgtcccctaccctctctccatggtaataaattatacaagtagtagtattagcctttcttcatgagtcaagctgtcattgaaaattcccattaaagtgcgaggggacgctcatatctttaaagaaagtgtggctgccaaggaaacgagggaggtaaaaataaacttttaaggagatcttgagatggaagagaaagaatcgttctactcgaaagattatttcaaatgctaccttttctgttggactcttctttctttctttatgattaatattattattttgggatttggtgttttactctgttgtccaggctggagtgcggtggcacaatctcggcttattgcagccttgacctcctgggttcaagtgatcatcccgcctccacctcccaagtagctgggaccacaggtgcatgccaccacacccggctaattctttttgtatttttttgtagagtcagggtcttgctatgttgcccaggctggttttgaactcctgagctcaagccatccctccacctctgccttcccaagtgctgggactacaggcctgggccaccgcacctggtgtggattcttctttagcttgcttagaatgttctgcaaagaaatctgaattcactcatatggagaggtgattgtcatatcctagtttgcattagaaactttagggtgtcattttcaactaaatttatcgtagaactgtaggagggtcagtgtttcttccctaatatactgaaggtccactatgtgtatagcgaattaagctatgcaaggttttatataataagaaccagacatgtttcattttaaaggcggcgtcaacacagactaacgaatacatcaaatatctgtatgtatttttaaatctatatgtagatatatagctttctatatatcttattaatctataaccttactgtgacttactaatgatttttcttgagcagaacctgaagtttgaagtatctcaatgctgaatttgacataccatagacttacttcaatggctaggagagcaagaaagatgctagaattatctttagttataaaaacaagaagagaaaagaaaagtagtggcgggggggtggtgggggaagtgggaagagaaaatgggaaagactttagaggaagacattctaaaggcatttatactaagaagaattgggctttttttttcctgtttatactgtttcaccttaaactataactcagaagaggcaaacatgaccacctatccatcagtataataatgcatcaggattttcagaagggaaccacaataatggattttaaaaaaccattactggtatgaaaatcccttttcccctacaaccactgctgattgtcgaaaataacttcatgctagacatggtggcttactcccgtaatcttagcacttcaggtgtcccaaagcaggagaatcgttgagcccaggagtttgagaccagcctagccaacatggtgtgaccccatctctacaaaaaaaagaaaaaaaaaatcaaaaaattacccaggtatggtgtcatgtgcctgtagttccagctacatgggaggctgaggtgggaggatcactcacacccagaaggtcaaggctgcaataaattgtgttcatgcactgcactgcagcctgggcaacagagcaagaccctgtctgaaaagtaataataatatataataataactttatgtactttggcatttttcagaagatgcttcttacccacatagcaatggaatttatgaaggtaacttttgggccgggtgtggtggcttatgcctgtaatcccggcgctttgagaggccgaggtgggtggatcatgagatctggagatcgagaccatcctgactaatacggtgaaatcccatctctactaaaaatacacaaaattagccaggcgtggtggcacatgcctgtattcccagctacctgggaggctgaggcaagagaatcgcttgaacctgggagacggaggttgcagtgagctgagatcgtgccactgcactccagcctgggcaacagagcgagactctgtctcaaaaaaccaagaaaaaaaaaaagaaggtaacttttgtctttagtctttcctatttcaatggccacatataaaggatggaaggaaaggcttcagataataaagagcaatggcttggtgggcaccaagggtcagaaagactttaataacttagtccacctcctccattctgtatatgatgagactgtgagtcagctgggagtaattaccttatttccatgcagccatttatttaactaataattagtgataacctattatgtgttgcaaacaaatacgcacaggggtgcaatgaaaaataaaaatatatttactgctcttaacaactcttatagtttggtgaggaagttaaatgtgctgggggttcagcaaagggtctggcctactgtggcgggagagggtccagaaagattttacacatttacagtcaattgattttcagcaaggatattaaaactcaatagggagcaaacagactttacagtaaatggtgctgggaaaacctgatacccacaggtaaaagaaagaacttgggttcctacctcatagtgtagacaaaaattaactcaaaatggatgaaagactaaatgtaagagctaaacttagaaaactcttagaagaaaacataggcatacatcttagtgactttggattaggtaatggtttcttaggtatgatgccaaaagcacaaagaacaatagaaaaaaaatagataaattgaatgtcatcaaaattaaaaacttttgacctttaaagaacattatcaagaaaaaagacaacccacagaacgggagaaaatttttggtaactcatgtatctgataagagacttgtatctaggatatgtaaggtacatttacaatttaataataaaaagactcctcaatttttaaatgggcaaaagatccgaatagactttttttaaagaagatatgttaataataactatattattaacaaatgattaataaacatgtgaaaagatgctcaacatcattagctatcaggaaaatgcaaaccaaaaccaagatgagaaaccatttcacatctactttggataagtgtaataaaaaagacagataataacaagtgtcggtgaggatgtagagaaactggaactcccccataagttgctggtagaatttaaagtcatacaggctgaaaaatattcgggcagtttctcaaaatgttcaacatagagatatcatatgacccagcaattccagtcctgggtctatactcaagagaaatcaaaacatgctactcaaaaacttctacacggatgttcatagcattattcatagtagccccaaactgccaataccccaaatgtctatcaactgatgaatggataaataaaatgtggggtgtgtgtatatagatacatattacatggcagtaaaaaagaatgaagtaatgatacattctacagcatggtagacttacaattgaaaacatcatgttagatgaaagaagccagtcacaaaagacaacatattgtatgattcaatttatatgaaatgtttagaatgggcaaatctatagagacagaaagattagtgattgtccaggtctgaaattggggacaaatgggagggactcctgatgggcatggagtttcttttggggtgataaaatgttctaaaatcggttgtggtaatagttgcacaactattttatttcctcagtcctgaacttcatgtccaggtagagatttattccctagagtaactaaggaggaggagtgttagccagcaccttcctccttcctcttggtgactagagtgttagcacgtcagtccaattctgaagttcaatcattggaagcctacttacccatagatttgagccacattctctaaaattgatttcattgctaatacagatgaacaggcttgctccatactgttctacaggctgtgcactgcacaattccacagatgccatttgcactatagtcatggcggcctcacagtgaatgtactaaactccgtgaatgtactaaaaactattcaattgtatactttcggtgggtgaattctatggtgtgtggatgatcttaataaagttgttattttagaaaaaaaatatatcatccaagtcatattttagcccagtctggagggaacaagagtgggaagtgaaggccattcaggaaaacaggacagagtcacaaaggcactgttctgtgtgtacctggagggcacaagcgggtgcaacagatgaggagggaaagacagagccccacaaaactgaaatgacatgccagaagtggctgtaaggtccttaaagtcagggtcttaacttacccttcattgtgtgtccggtactcggcacagaggagacctacggcagatatttatctgttgattgagtgaatgcatagtgagctaagaacaaaccttgaatacttagtgatagtatctaaatgagatgactgagcttctcactcctaggtcagtctttgttgtgctatgtctgatggaaagttttagaatcaagatgagaataactccttttataatgatactcatattttagcagttatatgtgttgaaaatgtttgatcagtcttttttatatttagttgttctagtaagtatataatggtatctcattgtggttttaattttcatttccctagtgatgaatggtactgagcattttttcagatgcttttcttctgtccatatatcttcttcacatatatccactgctaccgtctagttcaaggtactgtcgtcttcagctgtgttattgcaacagtctctttttttttttttttttttgagatggtgtctcgctctgtcacctaggctggagtgcagtggcgcgatctcagctcactgcaaactctgcctcctgggttcacgccattctcctgcctcagcctccctagtatctgggactacaggcacccgccactatgcctggctaatttttttttatttgtatttttagtagagatggggtttcaccgtgttagccaggatagtctcgatctcttgagcttgtgatctgcccacttcggcctcccaaaatgctgggattacaggcgtgagcccccatgcctggccagcaacagtctcttaactggggctccctgcttctcctcatctagccccttcacagcataagggccagagaaagtctgttaaactttcatcagccaggtgaggtagctcactcctgtaatcccagcactttgggaggccgaggcaggtgaatcaggaggtcaggagttcaagaccagcctggctaaaatggtgaaaccctgtctctactaaaaatataaaaattagccaggcacggtggcaggtgcctatagtcccagctactcgggaggctgaggcaggagaatcgtttgaacccgggtggtggaggttgcggtgagccgggattgcgccactgcactccagcctgggcaatagagtgagactccatctcaaaacaaaacaaaacaaaacaaaaaaacaaacaaaaaacaacctatgtctgatcttgtcacccttctgaaaccatccagtggttcctacctcagtagcagtcaaaggcaaagtcaaacagtgaccccctcatggcacgcatctgctgacctacaactgggcagtgaatatagacatttgcatttacctgtctggaacttggtcattttcgtttgggcctgttgtgtcagcttgtccgagctctcttggatcctcttttcaacatattgccataataaattattcctctcaggtttatgtcactggttagcaaggtgctaaccagtctgcccccacgaccacttcagagcctttggacttgctcttttcttcgccgggttctctgggatatcctgtggatcacaaaataacccttcaagtcatcgctgaaatcatctgtgtgagactttcctgactaccttgttttatgttgtaaaccagtttccgagtactcctgccccctttctgctttattttactccatatcttactcatttgtttattatcatctttccttatcacaaccttagcttcataaagttatgccctctttattcatactcaacacatttgcgaaagcaaaacgtgaattgcattgcattgcattgctcttccatttagcaatttggaatggcttcccatttgcatttagaaacatgagtccaaactcctttctacagtttataaggccctgcataatctccccactgcctgtctttccaccctcttctcatccacccttcccctgtccattcagtggagcctccgtggtttgcctttagcttctcagacatgccatggcctttggacaaacatcttccacatatattctttcccactcttcctttgcttaaccagctctttttctttcttttggtttccaattcaatgtctctacttcactggctactaatgtatactctgttattctctcacagcacctcattcccctccttcatggagcttattataagttttttattattttattgttcatttgcttttaaacaatcagtttcttccattaaaatgtaggttgtttgaggacagagacttttacttgtcttattctcttttgtattcagtgccccagtgccctgattgcaattagggtcacagtaactggatggataggtgggtgaagagatggccaagtgactgcctcaagtaacacagtaactggatggataggtgggtgaagagatggccaagtgactgcctcaagtaacacagtaactggatggataggtgggtgaagagatggccaagtgactgcctcaagtaacacagtaactggatggataggtgggtcaagagatggccaagtgactgcctcaagtaacacagtaactggatggataggtgggtcaagagatggccagttgactgcctcaagtaacacagtaactggatggataggtgggtgaagagacggccaagtgactgcctcaagtaacacagtaactggatggataggtgggtcaagagatggccaagtgactgcctcaagtaacacagtaactggatggataggtaggtgaagagatggccaagtgactgcctcaagtaaatttctcattttactacccactacccaatgaatctgaacaagttactgaaaatgtgcaagcttcagttttcctctttgtaaaatgaggatagatacaatgcctaccttataggattttgtaaaattttaggtcatctatgttaacctcatagtacaatgcatgacatgtaataattgctcaatacacactaataattactagttttactaatactgtgatccttagcttttccaccttcatctctctcccatctgtgtcccattttatcacattgctttccagagtcgtgatgattactgaatatgagactgctagtttgaactgcccagtgcatagcagtggagctattgcctaagcttatgttaatctagcatcagagccaactatcatttgccttattgtttatcaaatatgtctcattgtaaattcttattgagcttaaaattcaattaaaacccctcatggcacgcatctgctgacctacaactgggtggtgaatatagacatttgcatttacctgtctggaacttggtcattttcgtttgggcctgtcgtgtcagcttgtccgagctctcttggatcctcttttcaacatattgccataataaattcttcctctgaggtttgtgtcacagacacatttgatcagcacatcggtggcatcctcattaaagtcagtggtctaaatagtatagcacagagagcatcacagagcctatgacctgcagcttccttgtaatttgatatttgctgttctgtcttccatgtgatttgttctaattgatgtttaagaaccagatcatgtttatttttctgtttaagaaccagaccattgccttcttcaaaataattctagtcaaataaaaaaattatttttatgcctactgtgtgtaagtagcttgcctagataccgatgaaccatgtgacagaagcttgccttgatggtgggcaatgaggaaatcgggcatggatggctaagaaatcaaagtgccgttgtaaatatggagcagatttgtagtttggcaggatataaacccgtgttgggaaactcccaatgagaggtcaaaattgaaatggggctgtctgaaattccattttgttcatctagataacctggataaatgggctaaattggaaatttgagtcttaaaatcatttttttgagatttctcctattcattctattgacttactctccattttaaagtcttttgtcctaatcatttaccctatatctctctgttctatgcctattttatttttctttatgaaaatgggtgaaagcaggaattttgctagttttctaattatcacagcatataaattcagtaatgtatgtgaaagtgttttctaaactatgaaaagctgtatacatacataggaatagaatggattgtcaataaattgaagagatgagtttactcctttgtatgtggaagctgttaatttaaaataacacactcaaaatattagctaaaaatctacttcacattttggtgctgcttgctaaaattagttagaaaatataggttatttttgagttaaaaccaagttcaataaattcttaagttcctcaaatagaattttacagaaatatttacataacccacagctaaagtgagttttctaagaactccccataaggtgagatcacgtacaccatgtctcagtacagaaggatttttttttcaatcagttatgtctctataaataaacctagttttgttgttaaaattgctgtttcctcttcacataagaacatgtcattaattttggtgaaaaccttccaacaaaataaggttaaattgtccagttttccagtggaagaggaattattttgtgtcaccaacaagcagagtaacagcttaaaggtaagttgaacacagacatgctgtttgggtggtcagaatattttgcatccaagcataaatgttagtaagagcctataggtgagaatgctttaggtatgtttttagtaatgctttacctctgctactctccttaggatttgggaaccagagcattcatactgatgttctctgtaattaggtacaccaaggagtaacagaaactgggtaggtaggtaggtagagagaggtgacctcagccagagccggtgtgtttgtataggcaagaagaggagctgtattccatggtctgaactattaagtgatccagactacaagaatatgacttccttttctcagttgtttgaagttcatttagcgaaaaattaaaatacagtttcctataaaacaaaatcatttagtttgaactggaaaaacatttgaggttttcttggtttgagagaaaataaacattttcttttgtcctagcacctataccaaacagtaatattgacaaaaaccaaacctaagaaaatgcattttttttcctctaaattaagaaatagtatgtatggctttaagatgctgcttaaaaaaaaagaataagtcttacatttgttctagttgtcagagattgacagaactaataagagaataaaagagcaaaacgaaaaagttcttgctgattaacagttgtctgaggagaaacagacgatatgttttctttattgcattgaaaagttaattattaccaatagaagcttatttatgcttgtaactgagttagcgttgtggcttggcattattccacatttgaagggaaatgggtatcggcgaagagtctggagcttgagttctagtacagttgagtgggcttagcgagtggtttaacttcactggatcccacgttcccacctgtaaagtgaggcgatagattaagatgatgactgaggtgtcttgtgtccctaactgcatgtttttttcctaaaggcctattttgttttttatgaaacaaaatattttatcttcacagggaagtttactcccaaatgtttttgggaccatttagataggagtacactttagaaaaaaatataagcagcacagtatttaaagaacagaaattgtatttgctaagtaaatactgtacatcgaagtcttggaagttagatacaaaataagccaaaagtttcattttatattccctttagcaatcagaatatttgattattttctagacagtttctgtaagagtaccatttggtataagagttttaatttgtgatagtagaaaagtaataaaaatgtgtacaccatctaagagacaaaataattttgccaaaaattgccttttgttctggttaagaataaatgggccaatttcttttacacaataatttttagtagcagataccatatctaaaaaactatatttactatggcaatagtagcagactaattatccagctttctttggaaattgtgacttttgtagttgtcaatacttttatatctacactgaaaaatttttggctttgaagagtatgcctgcatgtatgttgattttcctgtaattttagtatctgggaaaatattccatctgaagcatatgtagaagtatagaaaattgttgaaattccattttgaaatgacctttaggctgctcttcatttaaggtaatagtgtcaattttgaacaaactgtttcaaaaactttatttaatttaggattatgaatggcatccttgttggtttttaagtatttttaacctcatgatgagaatctgagagcattgtaaatacatttaataatgaaaaagatattttctaaacttgaagtcaataataaacttcttgtatttaaattgacttatgaagttttcttaaggcaaaatcagttataactttatgaatagcaatattttcagttcatttaaatttattttatttttatagatagtgaaagcatctgtatcttatttgaaagtgcctgtcattctcttatttattaaaattgctttagtgtggtttttatatttagtcttggtttttacttgtgtttagccatatttctacacatagggaatggtgcaggagctacaccactgtaattagtagtgggcaatgtgaccaagtttttttaatcttatatttcaatataatttcaatgcaattactctattgagtaattaataactttaatgtttagacataagtgaatataattagcccaaaatataacaacataatgtgaaaatgatgtttagacttcacttactgagtcctgaagccctaatattaatacttataatttcctgctgtaaatttttatgaaaactaaataagagtatcataataatttctgttatttactgtagcccagatgattgtaaatttgaggaggaaatgatgtaccttagatgtgtcattggacttgcacttgttttttatcaaaatgatagggaatcaattaatattttaatagttacaaaagaaagtgaagagtgaaatagcttggatattattcatatatagtgtgtatatgtgtgtgcacatatgtatatgtaggtatatatacatgtatataaaattatctggccatctggatcatatatatatgtataatgtctggcacattgcacatagcaggcacatagtatgtgctcaaaaatatttattgtattgaattgagagcttgggaaggaatagtttaagggaataaattaacagtttgctttcctaaactggaattattttattatattttatttttgcttttggatgatttttctcagttggcaaaaaaaactattgtcaaatggtaataaaagtcaataactgtaatgaatattccttttattatgctgtgatatgttttcctgcattttgggtaactgtttaaagataatttttctttggtaattcttttatctaccagcttttatactttttagatttttcatttttattcgccattggaaagactactttttttatatggagatgtcccaccagaaaagattgttttcctggttttttgcagttcattttgaaagaagcaactccaggtttatttttgatttgaatacagctagtgtagcatgagaaaatccttttgaagtgctttcagaaggattaggtcagggttaggtgtagttttttttttacataaagtaaatttagagttgctattttaaaaaattgtgccaatttgttagcaaacacaggtcaaaggtacctttacactggtgactttcacctcagaaacagtgggtgatcttcaccagtcaccctctttctgcttttctgccaaggaagggatcatggcttggtctcagggaagaaaggaaggagtcccagtttcttcctggtacttttgtttactaatgtactaagggctattttattaaatagcattataagtcaacttgaatatattacatatatttaatatatgcattcatgtataatattaatataatatatatgtatatcttaaaatagatgtatatatctaaatattatatgtaaatatacatgtgtataaaattagtcttatatattaacattttaagtggaaaatgattttttctttcattaaattggaatgtcaagtacatggctgacataatttccttctagaaaataagaacctggctagacacagtggctcatgcctgtaatcccaacactttgggaggtcaaggcaggaggatcgcttgagcccaggagttcaagaccagcctgggcaacatgacaaaaccccgtctctacaaaaaaaatacagaaattagcctggcatggtgacacagacgtgtagtcccagctacttgggagactgaggcatgagaatctcttgagccggggaggttaaggctgaagtgaactgtaatctcaccagcctgggtgacactaagacaatgagaccctgtctcaaaaaaaaaaaagaagaagaagagaaaagaaaagaagggccaaactgttacttttttgagcctttctttctttagaaatcataacatttgggtggtcatagcatattaaaggattccttttatatgtataccaagcaaaggaatataggtctacattagtctttttagttatgttctctccacaaacattataagaccatcatatttaaatgtcccaatatagcattttatagtatgtgcagtagaatagatgccatagaattaccagctttgcaaaacaaggaactgccaaatatccaaaatgttttgagtttattaccttcgttaacatagctcttgtgatacagctctgaacaaaacatagaaacattctcttggatgatagttcatttaggtgggtttgtaagtcattgagcaccattcctgggatgtctttcctacagatacagtaaacattgtagtcctccagtagtcagatactaaaaacagtcaactcccagctgagtgagggggaagagcggaattaggaagccactttcaaaatctgtacagtgatatcagacccttgatatttgtagggacaaatctacaatcttcacaagtgaaggcaaaaacaatgaatttctcctagtaagtgtagtaaggtataacgggtcccttcaacctctggaatgtttataaacttagaataaaaattatttgtgaagccagtgaaataaatcctactactaagataaactcagtgtatttcatcccagtggagtgacatttcaggagggggttatgttccaagttcagcctaaaaggttgaatattgcatgtgaccaaattactttaaaaaaatctcataaattcctcataatttaatggtctacatggatttgtctgtattgattttatgtgcatttagagccatatattcctgccacattggagacattcataccctatctcaaagattttaacccctatcactttactttcattgttgggatagattgctgttgaatcaaatggggagtcgataaacaagttgacttgtgtttggcaatgtttgtgctttgtatgaaaaatatacgtgtttcttagatgaaattaccacatagtgttgtcagatggtcatactatgaaaggtacacatgtactgtgaccgaccaagggctcagtggagtcatgtctcactcttcatgctcactccaaggcattcactcattgagttgaatggtggatggagtcacccatacttcttccatttatctctttctgttacatgttgcaactctactatatgttcctattgcagtaactatgaaccatctgattttatgatggtaatgtttgaagacaaggatgaaatgtaccacatagcagggtgataagagattgcatctcttgagagccatttacatcaaactcaagagcagaaacaggggaccttaaaagtaagaaatgaaggatacaacctgggcaagagacaggtgtgcttctgaagtggtaggtttttaacattgtgattgatggctgtcttttatagttcagctcttgatacattttctggtattgaaccaatgcaaaacttattgtcagacaattttaaaactccacaccattgacagatgataactggtgtggtcaacaattaggagatttatatatttgactccttcattattttaagacttttctatttatttcaacattgtcttttttcacttcatctctttttactcacaatttcgggttgtctttatccatttcaatctgtaatctgaatctacctctcccagttactcttggcgatattcacattaccctaacaactcttttgcaatgcatcgtttgaaaaatgtttcacctctcttttatagctttccaacaatcacatcttatttcagatttttccctcatccagggctatcttaatgttcctttacaccttttatgtctgctcctagcatcagcagacataaaaagtcaagatctctatctatgtatgcaaatatgtcagcatacaataccttgaacattgttaatattttactcatttagaacactgaaaaagcatgataggattaggggcagaaaaggccctatattattttaaagaaaaaaaattgcagatttaatgaatggcctgatattttgtctatgatgattagaaacttacattcataagagtgcaaagcaattttttttccatttttagcaaacataaagtctttattaaacctgtcccaaaaaagtagagatatcacctgaactcatttttgtaaactgaccgcagagttgtaatgattcttttgccactgaatctcctggcatgacagaacagtggtgtaaacttggcttagtcaaaaagtctgccgtattgtcgcaatgtaatacagtcagctttatatcagatgtctgaaattcttctcttctttagacacatacttttagaaaggcacttctttcttgccatagttccatttcatctgttttgaacacttgttttggctgagagctacgttagctctgaggaagtgcttctgaatttaagtgatcagttgatgccacttctgttaacattatgcaaagaaaaaaaaagtttcttaaaattccttaaagaatatttgcttagagtaaggattgattaaatagccacattggaagcaattggaaaactgaaaagttccacaaaaatgttgcatattttattgggaaggctgaaaggttaagttgcacgttgattcttaggctggcgtggagttcatcatgttgtaaaaggtgtagacagtgggacttgaggctaagcaaatccaaacctcaggacgtcttcaagtcactagccctaaagtctcctgcagaaatgcttcttcagagtgaaccaggcccagggctttgcacattgagatccttgtgtttggtagcatgatacttgacccatgtcatctgggttgtatcttctcctttgtctctgtgctatttgtgtcttccacctatgtcacattataggccaagaggttttagaaggcagactgtgtcatttcctctttattttctcttgtatctaggattgtttagggagacaatatggtgtagtagaaagattataggacttgaaatcagactaactccgttttgaatctcagctctgccactgtataatcttatgtaagttacttaacatctgtgagcttcagttttctcatctgtaaaacaggaataggatacttatttttatatggttgtcatgaacacagaatggaattttaaaatataaaatgctaagacagtgcttggtacatggtaagcactcaaaagtgatagctggtatcagtgttactattaagtccacagtgaaagcatgaagtcagcgttatgtgcaatcaacaatggtaaccgtgaacaggatttctagaatggtatcagcaaccttctgcatctgctacagtgaagaggataatcatttttggctgtttctaaaatgagtttctacttataatatccttttgttcacataggctggttccccaagtgtctagcttggagaatgagtcttagaaataaattttgctatattctagaccagtgctatgccaaaaaattttctgtgatgatgaaaatattttatacctgcactttccaatatggtagccatggaatcaccatgtggataccaagcacttatactgtgattaatgcaagtaaggaactaaattctttattttaattagcttaaatttaaatagccaaagcaagctagtgcagctctagacaaaaatttactaatgatttgacaaaatcaatcttaacatctataagttaataaaagtatgaactagtaaatactaaatttccaatgagttcatattttacacacaccgaactttatagaaatgattattttctcccaagtgatagattatatgtttcaattttcagtattatatactaccttacttttggaaatatattctttgaattcatccattggcttctgagtgataaattcacattgtcaaaatttgtcagcctcaaatccaccagttccttcttttaacttgcgaggatttttggatctagtcttcttactgttctgtaatttttcttctccccattctcatcttctgttacacaaacaagtcaccctatattaaagatggcgaaataatttttaagtcacataatgtttactagcaggaataaatcactaccattgaggtattatagtttatgcttctttttctttccaggcaaatttatccttttgaattaagatgttatataatttttcaaataggttttgcattcatttctttggatattttttcttaggaaatcaggaaaaatgtatagtagagtttcttttaatgaaactttttatttggttctacttaatttatgtaaaaaatatattttaattatctgaaatacagaatgcttctcaaattgtaggattgtgaaatcaattttatagattgaagcaagaaatgtttttttttaagaagtggaattggacaggcatagtggctaatgcctataatcccaacactttgagaggctgaggtgggaggattgcttgaactcaggagttcaagaccagcctgcgccatatagcgagactttgtctctactaacaattaaaaaaaaattatctgggtatggtgacacatgcctgtagtcccagctacttgggaaccatatctatatctatatctatatctatatctatatctatatctatatctatatctatctatatatatatcttaatatatatataagataagataaaataaaagtagaataaaataagatggaataggaaatgtcagagcacatcacacatagtaagagttaatattatttcttgaaatgcttcttacatttatatgtgtgtgtgtctctgaattgtgatttaaaatggattttttactatggatcttggccaaaaaaatgtttgaaagcaactgcataatttattgtacgatgtggtgaaggcagtgaagtcagaagatctggttcaaggcttgagtgtactgctttagacaattttcaatgtcttcaacccaaaatttcttatatgtgtaaacagagatacctgccctatatgtttcatgcagttgtttcaaatatcaaatagaattctaaggtgatgtatagttgtaacactccttattcctttcaagtaataattttatattgacaaaactcagtggcttgcaccaacaatcatgtatatttatatttatgagtctgcaggtcaggtacgctttggctgatctgtgctgtatttgactgggtgtttctgcttcaggtcgtgggttgtgcattgtctgggccatggttggggtttggatctgatctccatgtattctttctgtggtctaagccaaaggggcagcggctacccagtgcatacacttctcatggttaatcaccagaacatgagctaaacataaatctatttatgatttttgcttacattatagccatgcaaattccactggccaaatgaaattatatggctaagcccaaagtccctggggagacataaggtattccactctcagtggaagggagatgggagtgaatatttgctgaacaacagtctaaataaactatcatattaccccaaaacttattaaacccacacgtttattaactgcctcattcttaaatataaaaggatagccaagtattatcctgtatttgaggaaaacctacaacataatggaaagtccaaatcagacaaacaagaaaggaatgtggaggaaactgaggcaacatataataagcaaaggaaaacatttaaatactgtatattctaataggtaaaatattatattcatagattaaaattagcatgctatgtaaaaaagtgtccgtaaaaacaagaaatagctcatagaaatacaaaatgggtagaaaattttcttaacgttcaaaatgaggtgtcatcagtcaaagaaatcttccagaagttacaatcagaagacagagatggaaaatataagaaaatgagataatcaatccaacaactaatgtcctggagctaaagtgtatggcattaaaatattttaaaatagtagaagaaaacatcctcaaactgaaaaaaataagccttcagattgaaaaggactcactgaaaactgcgcacaaggaatgaaaaacagctccattccaagattcagcattgcaaaatttcaaaatgacaaggaaaaagagatgactgtaaaagtttccagaaagaaaaaaatgtaaatcatagaccaagtactaagaatcaggatggcctagggattttcagttgtactattaggatctagaagacagtggaatagttcttaaaaatcctgaatgaaaactaatttcaaaatagagttttatacccagccaaacaatcaagtgtacacatacaataatagcattttcaggcaggcgaatactcgaaaatgtgtttttcgtgtaccttttcttattaaagctacctggagattgtacttcgaccaaaaaagggaataaattgagaaacatgatgacttatgacacagaaaacagagaaccctaaaagagcatagggaaggcttgacagaagatagagatcaaccaggccatacataaggtgccaagaaggatatatccagttcttaaaagaacatacactttatctaatatgttcatttaaaaaaaattattgatgattgtttaacagatatgtttgaatatttgggggaaaatgtcagttatctagaaaaacaaactattaaaaaactagacaattctagaaataataaaatgatacataagaaaattaatttaaacaagataatgcttgtctcagcagtgagcaaatttttcataatcattataatgtaaatgaactactgactaatgctttaaccaaaatcattatatgggagcatgaggtgggtatgtagggtgggtggtgcgagacctaaattgtcacccttcttcacgtaagaaaggtctaatattgaaaacttaagaaatagcagtataagtttgtcttttaaaaatgtgaagataaacatcagaagaactaatggtgcatgccattggagattaggtttgaaatcggggaggtagaccatgggcactgctgttccttgttatgagccatttaatactatgtaacttaaattaggtgcattactttgatgggcaaatttaatcaacaataaaaagaaagttaacatatgcccatgattaagaaaaaaacttcctacagtgtggagggatataaatgaacagcatcaagtctcccttttccaaattcgatccccagtactgttttcttgcagtgaccacttttaacagtttctactttgagttgttctggtggttatagtcatgacttgaaagataccttttgataaggtgtaaagctatctggacctgcctttgcccagttagccaaaagatggccacatcaaactgcactgtagacatgcaggttaatagtgtgctttgagagtaatgtacaattggcctatggctgttgttggtctttcatccccaagctactatatacagccagggaagcagccctgacctagttgggtgaggcaaagggttatcctgccagtgggagcatggcatttctggcaagagatttctcttctaacggttggacttggtgccatggcagattttcctgactcagggagtaagtgttgagccctggtccagctggttagattatttgttgattttgattatctgcaccaataagctctttcactggcatggataatcagaagcaggcagtaattttccatcttcctaacaaaaatgcatttcacattttgaaattacaatagatgaagttttattcagttttcaccaaaatactgcttcattgagaagggggaacttttatgaattaaattgagaactctttagagatagtcatatattcttaggtgggtcattttttcttgtcactttgctgttcttgaaagacagagggaaaaatcagtaataatgatatttgctgtcttttagtcagattttactatgtgctaggcactctgctaagtattcctagcctaatttaatcttcacaacagctttagaagcttgttatcactccgattttaggaggaagaaactgtatgatagtctaatgacttgtccaaggtcacagaaaagtgccagagctgtgtctggagccctgatttgcgttggctgttagacccatgttctttacctctgtgtttggactgttttggcaacgcaacccttgactttttattacatgaggaaaagaaagcagctaatttgtacttaaaacctaattaccagtgtaaggtacatatgttgttattgttgcatagtgcttacaaaaattgtatcttttctttttaaaaaagttttgaattttatacattttctattctgtcattcttttgtcttctctcaattcaaaattccggagtaatctttggtcttctgattcctctccttttatttccataaaatcaccattttctctttatatttctgttttaagtccctccactcctcatgtctggaatactgcaattatcttttcatggtctcccttccgccattctttgccaccttaaactgattgtacacattgatccagttttctcaagctcaacctctgtcatattgcatacctgtttaaaccattaatgtcaccctattatctataagaaaaatgtagcgttattaatctacaattaaagagctttcataatgtgatctaaagtatcactccggagcttttgtgcccttacttctttctcacttttcttgctcatgctaatatatccctcatctggctactgaggcatgaattttctctataactcagttggtgtttttatatgctttgcattttgatagtcttcttgtgtatctatgtctcatttacccagatgaattattaactactgagtttagagatgggaactctgaattcatcatattatttagtatagtttcttacatataggactgtgtaagaaaattaatgaataaatttttgaagttttaaagttaacctataattccaattctgtatttctttgcttttgttaattttataaatgttaaacaatacaaatttaatagtctttattatttttatctctttaattatatttaattatgaaattggaaatatatgggtataactttaataacacagtattttaaagaaataagtcagtttaacttagtattccaatttgaaagatacagaaaatctacagtgaatgaaaatgatacaattatttcacagtttttcaaataagccaatatttgagaactgtactaagttattatattgttggttaatgtatggttttgatggagataaactgaatatttatactgttatgaattcaagaaaaaatgtaaatgaattatttaatttatcttccatgatgtatcaaatgtagttggagattgttcagaatattgaataaggacatgaggaaatttggaagtttatttaaatactaaatttaaatccctctacttacacatgattttgttttccaaaaggaggttgcaattttttctgtatcaaatttgcttcttgctttctgctgaatttgaaaatgtttctgccctttcttttttttttttcttgttttaatagcctaaatatttttaaaggttcatcttttattttctttggcttaattttacagatgttctattgataaataaatatttctactttaatatataaattatttaaaattatggcctatataagatatttttgctttgaaatatttgagtttcagtaagataaggataatttcatcccgaaaccaaaaaataaaccttcataaattttatatattcatatttgtcttagagtgttcttgttgactttttaaattgcaaatttaaatggaaatattattttagctcagaaatctcatacactctcaatgcttaaatttctcatgcttttttttttcctggattattttttccaagtaatattgaacatcataatcatgccattttttacacctcacatttttcgaaaatctctcttatttattttacctttaatttgggttttgaaacacccaaatgaagccataaatttatcttttagaataaaaagtacatacttgatgtaaatcactgcatgtgtctgattgaatctcacacaaaaatgttactttttaaaggcagtggtattttaagtaaatattactttttaaagggaacgactcttagaatgaaagtgcaattatccactttgactactctcatttaatcatttcatttttaaaattagatttcattttacaatccaaaataaaacctcattcatgtgcatttttggatgtgctaattccttttgtcataaaatggaagctagcctaaattttctaataattttttatcaaattgaaattcatggcaaaaaataaaaatgagctaattttgaattcaagtgcatgtattttatatggatgctttttccccttctctctacctaaggaaatagagaaattgagaatagaactggatgaaagcaaacaacacttggaacaggagcagcagaaggcagccctggccagagaggagtgcctgagactaacagaactgctgggcgaatctgagcaccaactgcacctcaccaggtactccctaatcccattatgcgccatagcaccgatttcattccactgatttttgccacaggcttccaaacagttgttagagttagtcttagtcattcaattcacacttagctttcaggcatattaagaaaagtggagatgtggtaagcaaaacacccagacatgtgaatgataagtgtggcagggaattactgatagattacaaaacctttcatctacaatgctcaaatatttaggtgattctctatcaatataagcgaaatgacatatttctcctaccaccactactacctcttctgctaattctacgtctaataaaaatcttgaactgaaggatgtgaggaattcatttaggaaaataataaaatactgtcagtggtgagagagacaaagtaaataaattgtaagatgcaaattgaaatggaactgatacaaaataaggaatctgcatcctaaggaggtgtaaaattttgagatgaaatagattggcactgctcatgttcaaatcattattataaccaggcttacaccattgaggtttcaaattacttcatttccatcatgagattttgtgatgtgatcatcattgtcatcaactttagtaaatatgtagctcggccctaaattacagtaagactctttaggttgtaagcattgtgaatttgctgcattggaaaaaaacatacacacacatacacacacacataaatacacacatggaaagaaaaattcaaaagagaaagtagatatttcactttatcatatgtggtttcttttcactttgagttttattacgattttgcagtgttcacatcaagcctttggggttgctcagttcttaaagtttttcagtttttagagagaactttgtttaaataaacatgtaagttcatgatatttggtttggtttataaattagaaaaacattggtcttccaatcatagtaatatgttgaatttaaactatgaaaggggactgatcccttttacattaaatatgacaatgtaattctgagcacggtatgctaacagatggagaaaagcaccacttgaacagcctgcgtttggagaaaaaaatattctagaggttggtgaacctcccaaagttttgggtgagtgttaagatgcctctggttctgttaaaatcaaaccttgtataaaacattttgttatgataatattccaaatgatttgacatcttcccttttaaacaataaaagaaagaggaaagaaagagaaagcaaagaaagaaaataaattattaatacatgtctggtatctagaaaaaaatcctaatagatgaaacacatatatgagaaaaaaattgcttaatattgcagaataataactgttcttttaatgctcatttaaactattgtcattgtagaactgagaacataacgttagcataattcctgtggctatttaatcttagaagtttcagaatttagcttcatcatggtaatgttaatagtttttcttttctgtcagacttctattcagaaccaaccatttgtgtgctaagcactgctaaacctcagaaataggacagcttttaatgtctcagtgtggctgagcttcagtaaataaatattaatgctggttttgccccttttgccattctgtcttattcagagagttaatttctgaagtcaaagtccgtagagagttttcccgtatagtatcaatttatagtgtttgacaagatcaatttcttgcaagtagagcatattaagatgcagcaactgctgaaaatggacgagtggtaactaattcctttgttcttaagaaaaacggttttgcttggttccatagaaagctttttttttttgttgagctttatttaaaccaattctactaaaatttaaacgtagttttacaggaaataaaaattattttctaagtgcggtactcttttgtaagcattttatgcttagtctatattcatgttttataaaatccacattcataaatttaaagatgacaattagaaatgcaaggaactgtgtatatctcccctttgcactgacaatgtgatttggttgttgggctatttctgatatatagtacttttttgtttttttggtttttttttgaagtttgccacccctcaccatactttattgattcagtatactcaggtgtgtgactgagaaatgttgtgtcgttctttttcagtgtagatcagctgaaatacataactcccacgcagataacaccttaccacacagtctcaacttaaacacttcaaatggcatattctaaacaaagtttaaaattgaatatgaaaaccgtgtttaaagtaatgatgaaataaggatccaaatctttagaggcaaagaaaatttaaaaactgtagtagagatctgtacatcaacctaaaagaaaaatagcctaccacttttttggtgtttctccttatgggattttaaaacggtaaatagaggccaggcgcagtgctcacacctgtcattccaacactgtgggaggccaagacaggggaatcacttgaggctaagagttcgtgatcatcctgagcaacacaatgagaccccatctctacaaaaaaacaaaaaatattagtcaggcatggtggtgcacctatagacccagctatttaggaggctgaggatggaggatcacttgaactctgaggttcaaggctgctgtgagctgtgattgcgccgctacactccaacttgggtgacagagtaagaccctgtctctaaaaaaaaaaaatggaaaatagaaatttagcattaattaaaggacccaaatgggtgagtgtaacattcacttagtcaacaaatatttactgagcacctactatgttttaagtactttgcttggtcctaggcatagagagaaaaaataaaactcagtttctacccttagattgcgcatactctagtaaagaagctacatctgtatatgcaaatgtaatagactgtgacaacagtgcaatgataaaagtgatgattaccacaggagcacatagggagggggattggcccattctacaccataggtgaaggcgatagtcaaagaaagctgatatcagggaaagctgacagtgaaaagggatagtcagggaggtggagatatttggcagcaatcttgattagtgagttcatgagtaagaattctgaaagtggaagaaagtgggttgggtaccccaggtagagagaccaatatatacagagacataaagatgggagaaaacagaaactctactatcagattaggtgtttggtaggagataagactggaaaggggagcagggaccagcagaagagccttatgggccatctccggagtttcgcccattctgagttactcttaatgcattttaggcaggagcgtcaacatgattgactttctgggttgggagctggactcagagagcagtgtggaaagtgagctttgagagttgatctaggagacaggaagaccagttagcccaaggtcagcaattgcaacccatgggtcaagtctgacccatcatctgtttttgtgtgaccattaactaagaatggtttttatatttttaagtggatgaaaaaaaggggaaacaatattttttgacacataaagattatacatctataaataaagtttgattggaaaatgctaccattatccttcatttattatgtatggcactaccacacttgagttgaatatggtcctcaaagcctaaaatatctactatctgtccctttacagaaaagtgtaccaactcctcaggaggctgtttagttcaagtaagaagtcaagagggcttgaataatgacagattcaaatatgtatttaaagaaggtaattgaagagctttgtgaaaaatggatgggttgagaagagatgactggcagggaccccagttagaatataagcaccatagtccagggggagagtaatgaagcccttggctgtggctgtcccgtgaagtggaaaggaagtagtatcttcagaaggtatttggagtcatgaataagagaggacacaattaaaggtgactgtaagttttctagcccaaattgactagaggatctgttaagccaactgaggaacttaaaagaggtagcagaggaaaagaatacttttcattgtgcaaccccagtggagatgtccaatgttggcttggtgtgaggagaaggtcatgactagaggcttagatctggatcccttttacataaaggtattcattgtagctaagggagtggttaaaagcacatagaaaggatcatgttttaaagaacaatggaagaacagccaccagccgataagactgaaatggggtcttcgaatatataagaaaagaataaagaagaatgattcgaagagtattttcagggggcagtaacaattaaaaccatatacttttcttaggggaggtccccagacagcctaggattgaagaaacctgaattatagtatcttctgtaggcattcactccaggcattctttgcaacttttgacaaattacttaactctttgggcctgcttatgtacctataaaatgaggtgaggctagatgatttataagtttccttccagttctgataatcaatgattctaataatgatttaagacaacccattattaagttcctatatctggacattaggcatttaaattgcttggatgatcttttgtttaaggtatttccttagtttgaacttcagaaagttcattgaaatgaccttcagacccaccacttaaattcattgtaacttaggttctgctgacctctcacaaaggttatcaaaattgtctcaacacccttccagtctcttttgctgaccattgcccggtgaatattcataagcctctgccttgactctgttgctatactctgaaaaccttccatggtgccactctattagagaaaggcaaatgacaacatggcatgtgaggtcatcctgataggctctcaaccttccagtcttatttcatctaagatgaaaccctcttacctgctgatttccagacaaatgtcagtacacatagctcccctttttccctccatttgctgttctctatacctagaatacccctctgaccttctctagctctattataatcttaccttcttaccaaggtctccctgaaatcctgatttttctacctaggcctccccattgattcttgtcagaaaggagcgcttctccccttgaatccttcttcccactttgagctgatggcatttgagtaaatgaattactcaaaggaggaaaaagcaaaatgtggaaaaaaaaagaattaatatttggaagttttttgtgtacttgctattttttgcttctggaatgtgttattcttcaagtaggaggagaggtcttatcagtattatatttctcagagcccctggctcatcactttgcagagttggagctcagtaagtcattaatgaaaatggtgactgtattccaaatgtatgactattctttcaagctcagtactgctatacaaataaatatcttctcacaaatatcagagtacaaagtataagaaggtgataaggctaaaattttttattgagaattttacttgtctctatgatactatattatgattttgtaataatcacttttttaaatttttaactttgtgtaaatatatatgtttaagtatatcagaatcaaatgataatcattctaacaaacaatgcaagtaggtttagtaaagtgcaccaggcctctcacttacatgtacgtgtttaaaaaccacacacacacacacacacacacactcactcttaaactagagttccgcataattaaaagatgacagtggaagccatgtactgtggtgcacacctgcagtcccagaaacttgggaggctgaggtaggagggtcgcttgagcccaggagttcaaggccatcctgggtaacatagcatgaccgcatctctgggggaaaaaaaaatgacagtatttgaaacaagtgcctcgtaagcatgttcactaaacacgtctagcctagcatgtatgaaaacaaagcaaggctgctttcttccagttattactgttaatattattcaaacaacttcttctttttccataacagactttcaggtacatttaaaaatgttcatccatttattcacccgttctacatggagcattttctgtcataagacgctgtgctagggatgaagggagatagaaagataaagaggcctcagctgctgcccttcagaagcttacaggctagcggggaagagaagaaaatacatgagtagatcgggtgtggtggctcacacctgtaatcccaggactttgggaggctgaggcgggcaggtcacttgagccccaggagtttgagaccagcctgggcaacgtggcgaaaccccatctccacaaaaaatacaaacattagctgggcatggtggtgcgcgcctatagtcccagctgctctggaggctgaggtgggaggatggcttgagcccaggaggtcaaggctgcagtgagctgtgatggcactgctgcactccagcctgggcaacagagcaagaccttgtctctaaaattaaagaaaaaagtaagaaaaagaacatacacatgtagtcggtaagataaatgataagatccagaagggaggttctagaaaaggattacagggggagagacagattacttcttactgattttggtaggatttggatataggaaaatgggaatgaagggcattccgtgtaggggaatcgatggtatttgggaggtgtgcatgtatgtataagagtaagttaaatacagtacacacagcgatcaaacagacacctaacaagtatcacctcggaggttaagaatatattcatcttaggccgggcacggtggctcatgcctgtaatcccagcactttgggaggccgaggcgggcggatcacctgaggtcaggagttcgagaccagcctgaccaacatggagaaaccccatctgtactaaaaatacaaaattagccaggcatggtgttgcaagcctgtaatcccagctactcgggaggccgaggctcaagaatcacttgagcccgggaggcagaggttgcagtgagctgagtttgcaccattgtactccagactgggcaacaagagtgaagctccatctcaaaaacaccaccaccaacaacaatatattcgtcttagtatctgcgtggtaccacgctacatgtagcagctctttaaaaaataatagagttatagctaacagcagtggctaacatttgctgagcccctgctgttccaggaaccaagctgagagcttctcatataatcctaccaatagctctataaggtacagactcctattttctgtaatttacagctgaggcaactaaggcacagagaaggaaaggagtcttctaaggttacacagctgatatgttatcgaagcaggttttgaaccccagtaagttgcctgcaaagcttgtacccttatccattaagctgtaattctatgtaaattactagagaaatggattaatgcagttgttctgaaaaagacaacttagaaaatcagtaacatgaatttataatagaaataaatgttagcttcttccggccgggcgcggtggctcacgcctgtaatcctagcactttgggaggctaaggcaggcagatcgcgagaggtcaggagtaatcccagcactttgggaggccgagacaggcggatcacgaggtcaggagatcaagaccatcctggctaacatggtaaaaacccgtctccagtaaaaatacaaaaaattagctgggcatgatggcacacgtccgtagtcccagctactcaggaggctgaggcaggagaatctcttgaacccgggaagtggaggttacagtgagccgagattgcgccactgcactccagcctgggtgacagagcgagactccatctcaaaaaagaaagaaagtgagagagagagagagagagagaaagaaagaaaggaaagaagtgttagctgctcccttatgcatgacacgtgacggtgaattttggcttgaatttttcctaagaaacatagtttcccttggcccattatttgccattgtcatttaaacatattataatgccattgtcattctactttactcccttacttaattttcacccaagaagaaagagaggcttttattaaaaagtagaaatttttcaagtatttatttttgacatgtccaaatatctgtaaagagctataggtatcacctcggaggttaagaatgtattcatcttaggccaggggcggtggcttatgccgctcatatgactaccatttatacacacgtggttgggttaatttacgatatggctgaataaagcaaccacttcttaccgtttatgtgattcttattaactgcttactgagacattcttttccataccttttgcccatgtactgaaacacatttttttaaatcctgcattttttttttcttgtatctgatcttgaggggaactactgcaggaagctttcttttgtttattatccagagaatttagaactcggattgccctaagtacaaaaccttaaaaattcttatttctccttttacataaatgatctttttaataatatgtatgtacttcaaagaatttctcagagcaggaatctaagtgagagtccaccaaacaggtattatactgtgacctacttttgtgatccagatgggaagatctgacctgtgacctagagagacagcaacttgacctataggatttgtgtctttttgaaagtgagaaaagggtacagcagaggagtcactaggttaacctgttatgatggatagatcatgtggggagagtgatagaggctgcctttccagggctttcagtttccacatagtaactagtacagttacttatttgtttctttaatttgaagcaagagtcttgctctgttgcccagcctgcagtgcagtggtgtggtcttggctcactacaacctctgcctcccaggtccaagcaattctcgtgtctcaccctcccaagtagctgggattacaggtaggcaccaccatgcctggctaatttttgtatttttagtagagacggggtttcaccatgttggccagactggtctcaaactcctgacctctggtgatctgcctgccttagcctcccaaagtgctaggattacaggtgtgagccactgtgcccggcctctagtacagatattttcttgaaattaattgtttgacctcccagcctatccatacgagtcaggactttttgggtgaactgaaatccaaaaaggagaaattgataaatttttataactagaccatgtacaatccaggtgcagctggactcagggtttcctggagccagcatgctatcatattctaactttccagaacagggctcaatttctatctgaattttgctaattctttcagattctttcataccatgaagtaaaacatctttcattctgaaattgatgataaaggaaatacctttgatttcaaactgtaagaatgtgacttcctagctccttcacttccaatttcaaaacctttggttaggatcacccttgggcacacacacgcacttttgggtgctgtggctggtagcctcttcagaaccacatggaataagggaagaaagtttcactaagtaaggggaagtgctcttactaggggaaaggtgtcagggatcctgggtgagtaaaacaccaagtatctgcactgttgcccttgttgtctttttaaaaatataatccctggtcaggtgccatggctcatgcctgtaatcccagcaccttgggaggccaaggtgggaggatcacttgaggccaggaggtcaagaccagtctgagcaacataatgagaccccagctctaccaaaaaaaaaaaaaaaaaattaaaaaattagccaggcatggttgtgcatgcctgtagtcctagctatttgggaggctacatggtggtgcgcgcctgggtcctggctacttgggaggctacgtggtggtgcgtgcctgggtcctggctatttgggaggctacatggtggtgcatgcctgagtcctggttatttgggaggctacgtggtggtgcgtgcctgagtcctggctatttgggaagctacgtggtggtgcgtgcctgagtcctggctatttgggaggctacgtggtggtgcgtgcctgagtcctggctatttgggaggctacgtggtggtgcgtgcctgtagtcctggctacttgggaagactgcttgagcctgggagtttaaggctacagtgagctttgattgccatcgcactccagcctgggcgacagagcgagactctgtcccccctcccccccccaaaaaaaaaataataaataaaaatgcaagtcctgatttttcctctaagaaatggtttcaagtggagagaggggagtgaagtgcacatttttgtccatgtatgttggaaaatgatattctccattgtcaacatgtgataagtccaaagaggcatcatcagttcttcacaacaacagggtctctttgttgttttacttagaaaactcttagaatataaaaagaaagaagcacagctaaatctctagcatgcacatgtattgtgcttggtttctgcatagtgctgttccagctgtggcccatgatggctgcttgttagtgtctatggcaagataagtaccggaatctacagaagtatttggcaaattttatatcaattttaaattgtcacaattttcaagcgcatgatcaatgagctttttttgggggagtatcttttaaatttttttctagtaattcatttttattgtgttttaaaaaactatttgcaaaagattagaaattaaaacaaatatgctgatcatttaccacaagaagcttgagatgctatgcttctcactgcttccagcaagcctaagaaaaaacagtcctttatagatgaggaagccgagcctccgaaggggaagcttgaggttgggcatccaggagggaggagagtaggcaggggatgaagggcaaaagcttgtttcaaactgagatagaaacacttttggtgttgtaaaatctcagcacccagaccaggaagcaggtctctttcatctctgtgcccccagcaccaagtcaggcactgggtgtttagcagattttctataaacattgagtaaagttccctttgctctttattattgggaaaattaaaacaaaaagttggggggaactcatcttaagataacaacaagcttaggtcaaaaagccaaactcattatctgtttatttgaagaggatattataacattgatgtatattcttgctattttacagtgaactttatcttttttttcctcctgagttttattcaagaatttttagcctaaagtttccatttcaaagttaagctcatttttttcttgtactcctttcatgaataaattaagcagagaatgtgtcaaaaataattttaaatggatatatgtgcaaccaacatcttcaaggcttgaaatagatggccttggtgctgttttaaattgcgtcctcttttccttcccccacccagtatcagagaaaacaggctgtcagaaagccagaaaagaaaaggcatttcattttgctctggtggacaccacactgcctgagcctgctctgctccacctgtttgaagggctaagaaccctggtctcagtgtggcccggggcgggagaggttcgaaagtcaggcagtgccaggaaatgtgtgtttgcaggttctgcttaacgttccctggctcgctcctctcagttctgtgaagcccaaatgtgaatgcaatgaaaatctccactggggatgcactcatctcccctgccacataggcccacagcctggagcatggtggcagcggcagccaactcatttcctgaagaagcccagaggaaaccgagaatgtattgcccacaccacttgcctgactcaacaacaatgagcatcaggttcaatgaaaataggaaagaaaaagcaaaaacatagaattgttctcatagtagccctaagccagagtatgtctctaaaagaaagttctgctctccaatattatttttaaagtaaaaggaatataacaaaagcccatcaccttgatgtttaatttcttccggtaaatttctaaaattaattcacattcttttatatatatttttagaggcacagtctcgctgtattgcccagcctggcttcaaactcctgggctcaagcggaactccctcctgagcctttcaagtagctgggatgacatgtgcgtgccactgtgcccgcctttgatatttagtttcttcttaaacacctcctcctagtgaatgtgttctttacatcagttgttaggcattactgccttgttatttaatgtttccgtgatacccacaaagtacatcgtgatttgttgattgataaatcttggaattaaagctcattttaaggatcctgagcaagtaagaggcttagggaatattcagtctcctcagtgccctctcccaagccatgtctcatgggagaccagggcccacttcaagtaaacacatttttattatgctgcaactctgttagagccaccaagcaaaggatgcagtcagtctcgggagatgagagtaggcaccaaacaggtcagaaaatgtttggaagcagcttgccatctagctgagctaagagtgtgctccaccttggctctgtgtggcctctccccagcaggcagggtcacctgtgatagggctgagcatctcctgccttgaccaagccatggagggtagagagagagagccacaggctgcttggttttcagaatatcaaagggattccttccccagggtgggcaccagtgaataagcagggcatccctttgacacctttcctgtatctaacttcaagaagcctattcctgaccaggagatttaccaaaagaatgaacccagtgttgaggaaataaccattagaaccatatgaacaaaagaggtaaacaaaataaagagcaagtcactattggaatgtgtgcaggaggtgggggtggtaggcggtcaaggtgaagcattcagagtgggtttgggcagtggtttgggcagtgttccggatttgccctttgcccagtagctcatctgaagtgtggctcaccaggcctttgcctggtagctcatctgaagtgtggctcaccaggctggacgttgcttgagcttgacagtcgtcctagttctatttctgattattttttgtcaccttggggaaaatcccctattgtacttgatttcctacagaccttaactgtgattttatgaggatatatatgagtatgcaaaatcattttaactcattcagcgttttgtaaatctgaggcttatctattcaggtactccaatgattttaatatgagttcaggtaaaataaattaatgagtagtcagtgtattgatccgtctagaaaactttagagcaattaagggcatgaccacctgactgaagctctttatggcaaggctatttggggcacagagtaatatattgttctttctacatcttaaatgatcctctttgtctttagaaggcaaactatcttgccattcctgatatcaactctttgtcaaaacaatatctaatggaagcagctctgtgccctaggggctctgtaagttctgctttgttacagtgatggcagttctctattcttagcctatttccgaagtcaggcatttgttcggaatcattcactattgaattagttaacaacgtttggtttgaggaaagatgataatgatattaaggaataataaaatccatctacagtgaaaatcgagcccagatcagaactgtggaggaacccaaattcagatcctacactcaaactgatttgcacaaagaattatctgttaaaagtgggaaaaagaatggcagcatgcgacaactcacgtaactaatcaactttttagatgccgtttcatatgtttgcttttcattaaatgcaggaatggttgggactatgttgctgtgattcagtcaacatttattcctatctgtttttcatgtacaaaggctgagggatgccagcaaataaactgttaacggagaattaacttctttggcatgctttcatacttatcttccaaattaaagaaaatgaaatgggcagaaacagagtgtagattacctcctttttgtcaaaaatggtgggaatttgaaaattaataataaaaaagggaacagatgcagtaacatgccagagggagattaatgtggagagtaaaatctgtgagcaacaaaactgaagcaaactgaatcagtgggaggtggttgtacaatcaaaatcaggataaaagagaaattacaaacaaccctgcacttgtcaaagtagtagtaatgaaatcctgactctgccagcagtgagaacctgtgttagcactttggggtaaggatggtagccgggtgccaggtaggagggcagtgttaggttgctgggcagcagccatcttgtgtagaacagatggcaccgaaagctggcaggggaggggctccttagcagaactaatcagacagtaacagatagggcagctgggaagactgaccacagagagggagtctgcggggtagccgagtgccatgatgtttgcagtggtgtgcccattggtctgagataagaccttgcaatgtctttcccatctacagaagaactgaaactttgttcaaaaaggaaaattgagttgaattgtgtcaaacttggagggtgggggtgggcattgggatagtgactgagaaaggaagaattgtccatctctgaatttgtcctgtgagttttcagttccagctaccatggaaccttgatttttgctgtttgtatggttctggcaatctaatgtatacagtgtggcacatggaatgatcactttatacattttatgcatcaaaaagtttgcagtatcaaggctatagttaaaattagaaaagattttttttatatgctttctaccacatatgtctttcacaaaatgaaaaactaaaagcaaccatgtgatacaggcatttctacttaataatttttcataagctcatttaagctgtgtttgattcagagtcacttgcccttcttttttcccccatgtaactgtgggttgaacatcaaaatataagcataattcagagccaaaaaccttaagacaaaaatcaaaccaactcattctgcaaataaaagagaaaactgacctgttaaaatttgataacttattaagtagtcgtggttcttgaagtatagagttgggacgtttgtattaaaacgacgactttaacaaagaaatccagatctcctacatctgcttttgaacttgtctatttcttttttttgcagaaggtttataacttggctcaatttattcattttggagggggagggggaaacattacaggatttgaaataggtggtataacatagccatatgctatttatgcagcagtttctgcaataaatctaatttggtgctgtcaaaaaattagacttatttgatatagcagcacattagtaaatgattgtggcagatttaaagttgtcatttagtctcttcttactcttaacagaatctcgcaaattcattttcccccttgatcaactctatgaaaatatcccagttctttgtcctgcagccctgaaaatatttccacatctgaaagaaggtcttgccttaaggtaattgaggaagggggtggaaaaatgaatatcctctgtcgttaaaagacttcataaatatataggcagaaaaacaaataaaccagagaaaattacagtattttcatcatttacagttcttagaaaaacagaactgcaagtctcattcagaatgtagataaattaaggtcagttctttattaaggagtttaaatattttaccttccatcctacgtccatatgctgttttaggaaaactgattattaaagaatgtgagtgacatcagctcttcgccttcacctagcagcgcccttagaaacggctttactcttcggtagtgtaacctggcaacattgcttcaatgcctctttttctgttttttttttttcccctgtaaaatttgtgtttcaggtgttagtatcaaactatctaaactttttcctagtttttctgtttgaaagataagataagcaatgacgcattaagcaggtaaatattaacggtgttctctgagttcctgaattagtccatttataaaagtaatgatttcgtttcccgtttctttttcttgcgtgtttatggaaaagtgtatgtgtgtatcgcatttacgtgtctgtgtgtgactggaagtgatgttaaaactgagtgcttttcatttgtttatgttcgtatcatacaaattatccaaaagaaggctactagtgtgtttttgaaacgcagtttactcagagtgaagagttccttcacggtgatttaagcagcctctattaaactagcatcttgcaaatgcttctttcttttatacagcaaatcagaccatggaagtgatcaaattaccaggattgtttcactgctattcagaagcagggatccaggtgaccaaagtactgtcaagcacagattacactaaaggaaaaatatccagaaaagcagtaacaaacttgctgggaaaacttaatcaatatttttgaaatttcctccacatgaagagaaattatttagaaaggatgttttaggaagatgaagaagaaaacacctcctagaattcatattttgagtagaaaatccatacattaaattacattatatattacatgagaatgatttatatgacactgggtattttgaaggtcagcaataaaattgaaattatagctaagaagcatgtctcagtacttagattttaacctatctttttgattttgtttctgtttttaatttagcctcacaatttttaaaaatatgtctgaaaaactgctttgataaaatccttttcataaattataactgtttaatcagtcagaactttaagatttaaattttaaattccacgttttctccactgcttttgttaataaatttgacattcaattttatatcaataagaaatatttaatttttattttttctaaaaatttagaaaattttacagacttgattgattttacttgatacaagcatctgccataagattaaattttgggataatccttcaaaatataaaagcagccttatgaatgaagtgccatttaggttcacgtttaagttcacatttgtaacagtgttacttttttgccatatattttctcctaaaaaatgatcttccattttcttataagaaatttgaattgagtcattggtttgcccttttcctaaagaatatgatatctaaaataccagtaaataattcaacatagagtgatttcatgtctgatttatgaagggagagtaaatacttgatagctatagatgccacaaaataaattcaattgagagtataattttcacctaatttctatgagtttatttttttcacagaactagactattgatacaacttacatttctttagatagattatgtgtttgcttggcagcatatatttgaacattagtgaaacagaactttgttttttaaatgatggaatttataatatacatgcattgatttgtatattatgggttaagtttttcaaagcagtaatggagctgtgtgttaatatatagcttataattgaaatggtacatatttgtacattttaagcctttcagtgtaaaatttcttaattggaatactctctcccttggctaattcattagtgaaaatatttattcctcaagttaatgctatatagtatgatgcaatttttatatagtgtaaacttgtttatgatattttgatttcactttaaaacttttattttgcttcttagacatatagttcatactcagtataatgagaagtgcagacacacatgaagaaaatacatatcagctgtctggttttacaaatgatcattaaaacaccatgtcttactactttgactccaaattattgtcttcctgaacccaaaagtaattttcacaagtacattacacaacagaacttcatcttctgctggttagcagtagaggatttaaatccatgccgacagttcatttgacaatgaccttgaggggctttgcttcttgaagaagaaagcagaagcttgcggtaaacaaagttcacttctgacagatggattgaatgacagaaaggttgcgagtgccagaatagccctggcagaggaggaaatgttcagtggaatccaacaggagaggaggtgtgaacaggtgcagggttgctgacggaaggggaaccagatggaaggagccagagccagtttatttaaaggaaaaggcagaaaacattgaaaggctgtgcgatcagtggctaaaagtgttcatagaggaaggtaaaaattcacaaagcaaaactgcacagtggggtagctaacacttagcataatggtagtaatttgtgagtttagtttggaagttgcgattgaaatacattcatcttggctcttgacaccatccagtatagatatttgaaagttgtttatttttttaagtttctaagcttttttaaatccatccattaatttaattttttccagccagaagctccattatgataatactaaaattatgtcgtcagctaggaaaagaaaaaaatttaaagtgaaggttaacgttccattcaaatttatcttgtgatgcctcagttttgttcacatatggaaagcaaatgcatgcactgttgggtgacatctgtaatatctaagaaatttgcaatgttagaatagatgccgttggttgcttttgttgttttggatctctgttcattttgtgaagtccggtttgattgtttcagtaggaataatgctctttaaaatacacatttgctggccacaatctgcaggttaatttctgctgctgaggttgacctgattttcattgactttcagtgacctgcctttgggcagacacctgcaaacccaagtacaatttacaaaaggaacagtacgcatacagtggagcaagaaatgaggactttcttgttttctaagacctattaaaatgtaactttctccactgcaaaccagagatagccctgctaatactctgtgtggtcaattcatacataccacttatgtgggcccttgtctaccacagttttccttgaaaattttactacattacatttctgacaaagagacgccaatagaggaggagctattaagaagctatcaccgggaaaaatgatgacaatgcacaattattttgaggttttaaagatctcgtaaataatccacaaaagtttctgcacactgctcacagagattaaacacacaaagtaaatgagtactgtattgacattccttttctcagaactgcctggatcaaatagattacgtttgattaaggctggatgttttgagtttagagagaatgtctgtgattcgtggcatgcttttgtcagtaaatataaagaattgaaatcagattaacagttatagaagatgttgatttactcctgtgctgtatatcaagatcatcaattttggtctctttttttttaatctggatgaggcaatatacaactatattttgaaggaaaaatggttagtgatttcttctagtaaaaggaagttgatgacctgtattttaaagtcatctgcaaaatgtacttttttctcccacttgttaaggaatttttatctaataacttcttattaatctaaaattttatataaaatcgattggagtatccttgctttgattatagtgtactgattttgccatctcttccatcataattaccaaatttatttatataataatgctactagcatggtgctgctttttaaaataataacataaaactcacttgaactacggggttcaaattgaaagacagtaaaaagaaactgcaacaatcagtgtcatcatttgatagtcatatcacaaattaaattgtaaacttcttataggtagaaccaatagcttcccagaaatatgtaaatttagttgtacctagtaaagtgtcttttgtgatatgagtctttaatttttttgaatgaagggataacaagttgattgctgctaagcaggtattcagtcaacatttattgagcacatgttctgttctagctgcactaggcactatgtaaattttcaaaataaagagcccatgatccttttccacaagtatcctgcaacctaccagacaaggtttatgtaattacatatacacatacgtgtgtgtgtaaaatctagaaaatagtatataaatttataaactttctgtgactcatgatcatcttaaatgaattgatgaaactctcatctagctcaacacttataatgtgtgagaatgttgagagaagctaagtgattttcctaataccaacggtggttgagtgacagcaaaaagtagagtctaagtttcctttctctaagtctagtgctcttcctgcatcccacattatacttctttgttctcattgatgatatgacttgtctgagaaaccccattaaaacccttcagtgcaagtctttcacagcctgttttggaaaggaaaaaaaaattatttttggattttggcacacggttactggttcttgaaacaaacaaaacacaaaggttctttagcttgcaaacagtaattacgaagttcacttcttagaactttttttaattattatttatttatttatttatttattgctggagtctcactctgtcgcccaggctagagtgcagtggcgtgatctcagcttactgcaacctccgcctcccgggttcaagtgattctcctgcctcagcctcccgagtagccaggattacaggcgtgcaccatcacactcggctaatttttgtaattttagtagagacgagatttcaccatattggccagactgatctcaagctcctgactaggctcaagcgatcacctgcctcggcctcccaaagtgctgggattgcaggcatgagccatggcactcagcccgtttcttggaactacctctgggagtggtagtaaagataacctcccgcataaacgctgcttaccctgtaataggcatattcacttaatccccacataaccctaccaggtagattctgccataagccccattttacagataagaaaactgaggtattcagaggttagtaccttgacccaagtcacagcactgctaagtggtggcgtaggcactgaagcctaggcagctaggctcccgactacgattttatccattacactatattgcctctgatggtggatgttgtgaaaaataacttctgtcaccagttccttttggaaagttgtattcaacaggctaaaccaggtttcttgacagtagggcttctcagcgtttttaatatgttagtgcacactgtgactctcttagaaaggaatttagttttcagtgtttccgaaatttatatgacttatggaagcttttctatcaaatctccacacatcttccaggaatcacgtttttaggaatacacttggggaaaaactgaactaaactaatttgtagtaggactgctgaaaactatcatatggggattattcgttattgtatctcatcagtgcctctgcaacaccctactccatcccaccctgccccgcaacttcactttcattagaacacacacagttcatggaaagagtagataggttggtaactttcaattttcatttagtcatttctctaaaatgggggtgtggggtggggaagcatctttgaccagacttcaagagtagctggacagttagctgtgccagagtcacgttccaagttcttccatatcttactgtcccaactttgcctttatgtgataattctatttattttaaattatgtgtttattctagaaaacaaatttgacaattacataactagattgccagtcagttcattgaagttagacaccttttaaagcatgactctgaatgagatttcatagaataagatgttattgtggatgctctcctgtataaacgttttaggcaatctcctgccaggaattattggcacaaatttgaagtatgggccactaagtcagactgcactagattttattttccttcaacccatgatatggcaatattcctcccttttatgtgtattctttcctgtgttaggaagaaatggagcaactcatgggcaataagctctggaagtcgggaagtttagcactcataatgtgctaatttttctgtaaatacacttggaggtgcctataatttataattatgtcaagcagtttctactggtgaggttttctataaataaccatcttgtaatgataacgactggaattgtgattctcatgaagacttactatgtgtgctcctagctttcccacctgccctgctttctgggttctcaaattacatttccttcaataaatcaactccagcaatttttattaaagtttgaaaccattcactggcttatttgtattcctcaaggtgcagaaaatgtttgggaataagcgaaaactacaaaggcaacagattaaatccccaggcagtgggatagcttactaaactggctgacacattgattgacaagctaatatgactgcaaggtcctcttgatgaactttgaaactagtcgtttcttactagaaacaagtaatgaatgatataaggatgattactagagattgagtaaagaaatccatgtctatttgccatttaaaaattatagaaacactatccaatgatgaagattttccaattttatttacattcacttattaggaaggagtctgtgacccaggtacataactgaacattttaaaaataatttgccagcttggctgtatggattaactttttcataatactttgtaatttaattttaaatgtgaatatgttttttgggagttgcctcaaaccaaatctgatttacaaaaaaaaaaaaatgaaggggatcattttggtatactatggtgactacttcagcttcggttgttcttagtgttctatcagaattcttctcctttgtttctcctttcaaatcataggtgagtggctgaattaaatgagaaacttatcaaggttaaaaaaggtcattttaatagtttttgaaaattatgagttttgatatcttcatgaggcacttacgtttagtagttttgggcacctggttatttttatttgtggaatcaggatttaaaatgctgctttgctatagggtggtagacaaaggagtggcactcagaccagtgctgtccaatagaaatacagagggagccacaaaatgtaaaccacacatgtcatttaaaattttcaaataaccacattttaaaaagtaaaaggaggctgggcgcggtagctcatgtctgcaatcccaacactttaggaggccgaggtgggcagatcatttgaggtcaggagtttgagaccagcctagccaacatcgggaaaccttgtctcaactaaaaatacaaaaaaattagccaggcatgatggcgcacacctgtagtcacagctgctcaggaggctgagacaggataatcgcttgaacccgggaggcggaggttgcggtgagctgggcaacaagcaaaactctgtctcaattaaaaaaaaaaaaaaaaagcaaaaggaaacaggtgaaattagttttaataacataatttatttaacccaatgtatagaaaatagtatttcaacatgtgatttatataacacattattaatgacgtattttaaatttttttcctaagtcttcacacccctttgtgtattttgcacttacagcatgtcttgatccaacctagccatatttcaagtgcttactaaccccacgtggccagtggctgccactccagacgtcacagccctagacgtttgttactcagttttccagctttcccacaatgcccagcagagatgaagttagattctcatgagcttaaaccctgaattgtttctacaaaaatgggaaccattttattaaaacaagaaaatcatgtcatctttttcttgaattttggaggcagtagccaggactcatattgattagtctttttctgaagaatcgccactttgaggaggaggaggaagagagaggaagctaccacttactggccattacttgaagagcagatgagtgattaaatataccagcatcacattataataagttcttctatatcttactctcccatctttgccgttatatgttgaagagttgttgaaaataaatttgacagttaaataactagatgccgatctgttaactggatttagacaattaggaacctttcaaatggtgatctgggctggacgttgccggttgcctcatgtggagcttcccacataatcctgataatatcattttattaatgagaaaacagaggcttagattgagatgaggttccgccttgacgtgacacagctagcacatggtggagccagggctgaggcccagccctgtgtgtgcaacgctggccaatgctacctccccctgtgtagcttatgtcaggaaattgaggaaaatttttattctttcctcaaggctgtctttgagataattatattgattgtttcagtttgagtagtcatcttctaggaaataataaggataacaatagtaataatacgtactaattaatattttttaacttactatatgtcagtgctgtactaacagtattttatatgtaatatcctcatagtcctatgaggagaggtactgttattaaccttatttttcattcaagaaaactgagtcgtaggttatgtgacttacttagagcaggagttcccaactcggggtcacctgacctccatctcctgtcggagcagcagcatcattggattcccatggggcgctaaccgtattgtaaactgcgcatgtgagggatctaggttgtgcactccttatgagaatctaatgcttgatgatctgtcactgtctcccgtcaccccctgatggaactgtctagttgcaggaaagcaggctcaaggctcccactgattctacattatggtgagtgttataattatttcattatatgttacagtgtaataataatagaaataaactgcccaataaatggaatgcagtcgaatcatccccacaccccctaccctggtccgtggaaaaattgttttccatgaaaccagtcattgatgccaaaaaggctggggaccactgacttagggcacacagctgctaagtggaggaattgcaactttgatgctaagtctagcacacaccaaagcctgttctctaaacttctgcctccttgtgtacagatgccctgctggcagtggagcttacatgcgaagggataaaggctgaaagtatcctattgtttttaggggtattttaggatttcagttgcttatatttattttctcagagcacaaagtcctcagtttggatatagtcagggcaggctaccttgtggaaattagtttgaagatagatttagaaggctggaagcagcaggtttccaggaatggaaagggccgctctgtagctacaggaatggtgaggacgaagactaagaaatggctagaggaagagaaagatccagcagacacaggttattgaagcagaggaaataattaaggatgtagataagaatagttataagcaagtattacaaagtcaaatagaaataatgttaaatcataaaatgactaaaaggcaaaatgttttgatgaagaaagtgacttaattattgtatcaagaaaagaattttcttatttagaggaatgagaatagtggagtaggaatcagaaaacttgggctcacgtcagtttttttcttctgtagatgtagtgctttttacctccagaattgtgtgcaaagacggagaggttacagagttctcaatcaaactctaaaaatggactacagtggtcttgttgccaagtcaaggttactagtccatagaatacagccgtaatttctgtatacatgcacattggatgtttgaccaaaggcacaccatctcagcaataatgaaaattctactatctttattacagaagttccccacttactcaaacttagacttcttcttttttttttttttttggttttgagatggagtcttaccctgtcgcccaggctggagtgaagtggcatgatctcggctcaccacaacctccgcctcccgggctcaagcaattctcctgtctcagcctcctgagtaactgggattacaggcatgcacaccatgcccagctaatttttgtatttttagtagagacgggatttcaccatgttggccaggctggtctggaactcctgatctcaggtgatctgcctgccttggcctcccaaagtgttgggattacaggtgtgagccaccgtgcctgtcccaaacttagacttcttgctagtttgaaatatagctgtaaattgaggtataaattaaaacgtacttttaagaagcaagtaactatcacaaagcccttgcacttttctgtgcagcatctgtggaactatcctaacacacttttaggtgttaaaaagcaaaaaggaaaaaaattaaaaacaaaataaaaaaacatggcagcaaatcacagcaaaccaaccaataaagaattataagaagaccagtatgcttttggttctttagaataacatctgagaccttccttgcaataaatattattgaatgccttctgtttctagccactctattaagcccttaaagatctggcaatgagcaacgatccataggcacttactagcaaaaggaatagcaacagtaagtatgcctaccttgttttaaattatgaaccttaattattaaggagagcttattgtatttggtatagtttgcttaagaaagcagacataattaacacattttagacatatttctattgtaaatggcgagaattctgtggatctaatacctggaaaattctcgtatgtggaacatattctcaacattctagataaataatgcatgcattactctgtcatacttatgagataaaatataataaaaaatatataaattataattcttactattatacatatttctgaataaattttatagccacaagggaaccaacatgttccccatttaatattatatcctagaaattaattcctaaaacattttaataatagaataatagaatagaatagaatagaaactgttatgctacaatttgctaataatgcatttccattgacatgttatagaaacgccactagaatgcatattgatcctactgatacctgatttgaagttactcatcagagggattagttactgggaatttgtagatcaagtgatatttttcagagaagaaagccaagaatgcataaaagtcattagtttatacagacaaattgaaatggaaaatatgaatttttgaaaatatgaagatacaaaggcaaaatcatgatcgaatttattttaggtaatagcatatttggccttattatttagggtgatgaattgggctcagggtgttgtataataggatacagtagtgctttactatctcacaggatctttgccccatgcaatcacttaatgcatcaggcaccctgagctattgaaaacatttgaagactgaaaattaatgaagtgtgcattgtcaaatgcactgaggctgttcagtctcagtatctacctatggtatctaccgtatctaaagaaaccattacagaaattgctcttactattgctgtagtaataagtgctttccctgattctaatgttgtcccttccccatctgttccccacactgcagccagagtgatctttctaaagcacgagtgtgatcacaacactccgctgcttaaaaccctacattggctccctatttccctcaggacgagggccttaaaaatagcttcatgttctggctcctgcctacatctccaagtctcgtctttcttcaataatctcccctccaccaactgtgcgctgctgccccacaacatatatcctccagcatcccgtcatgccaaaactgtttgcagtgttctcagggcacctggttatctctccaccctgtgtctttgcacaaactgtccacttcacttgtaataatcttctttatattctttgtatggcagattactactcatattttaagcttctgattttttttaagcttcctgaaatccttcctccctgtccccagctactccccaattcctatcctttccacctgtatcatggcaggaatttagccctactttaatatttactgtaccatgagttgtttttttccccaaaactcgtttattttgttcactagacaatagactctctgaggccagggtctacatcttgcacactgatgcatccccatacttttgtgcttggcacaaagtagttgcttaagtatttgttgaatggatgcgcaatccactgtttgattaaacaaacccatcatgtgaggcagtgccatggaatggaaagaacactggacttggagtgagaagacagatttggattccagctttgctacttactagctgcatggctttgagaaaaatctcttaattcccgagtttgagacactttatctatcaaacaggaatatctgttccatctctctgccccacagagatgttatgaagaatagagaggtcggtgcatttgaatgtgccttttaaaatagaaagtacagacatgcaaagggtgatgcgctagtaactggagttgatagagtctgtggttttgttttaaaagtagatgggaattgtgcatatgtaatagaaacaggcaatagctagtctactgtattgtcttttgccttgaaggtaagttttcaaattattttggagatactgtaagaacatttttggagggaaaattatttttagagatgtttctgttaaatatttcctttcttttgtgtatattcccttgaaagaagttgacctcctttctgtttctgctttcttccctagaagtgactcattctctgatctgataactcatctttcaacattgtgcttgaagttctgacatactttgcaatgaagaaaatagaagtaatttactccaggaaatatgccattaagtcttttgcatacttaaggaagtagagattccagaatctcattcctgtgttttcctttctgtttcttctcagtagttccacatttgctcaaataagggaatacagcccctgttagctgtaaataagcatagaattttgggttcttctgaaacatggaagacatcatgctgtctaccaattttattattgtttttgttttgttttattttcaataataataataaattcttgcaaaaatagagattatcttatcatattctctgactgtagtcagtagacaggatgatacttacacctgtgaggatacttagtactttccgtcttttagtagttgatcattcattcattcgtttattcattcatgaaatgttcattgaccacacaactgtgtaccaggcactattccagattttcgggataaattagtgagcaaaacaaaggttcctattctccatggatttagattccagattgatgcacatgtcttatcttttctagagtctgtggccacttgaggcaggagatgtgtttgtggtacctttcaatgtttttgcaaaggtgaatatatgtcttcgagaaggacacaactaattgatggtgtcattgtaggagaaagtaatccaatagcttaggggacaacagggaaagaagaaggagaactagcttgggatttggctgtcaagatggataatatggctattaaatggcacactcccatatagataattgaaatagacacttgttatcctttcaaccttctctcatttctctacatccctgataaaagaagagactgaagcatagtgattcactgtggactttagagtcagatagccctggatttcctggctgtaacctttaataactaaagaacttggacatactgtataacctctctaggctcccattttcttatctataaagtgaagatactaagagaacctactttatatggttggtatgaggattaaataaaagaatgcatgtaaagaccttagcttatgtgtaaacattagtaattagtagcttcttaaaaggattagtcctttaaggttggattttctttttgttctgcttgaatgaagaaccccagtattaaaggaagaaagttattagtctatagtcacacaggtgataaggtggtagatgccatactctgaccctctagctctgtgagtttggctgtactccattgcctctcaaggtgtcatcttcccagagcacaaagagaataaactcaaaaagtacctatacatttgtttaaaaaacaaggcaaaacaaaacaaaactataagcaaatattgaaatctagttactagtagatttgctttccatagattattaattttgaaactactttctgtgtattccaagtttgaacaaacaagtatgttgaggataataggaaccaagtttcttactattgaggaaaaaattacaattatggaaaaaagggagacaaggttctatgtatgttgttggattgtaattggaaagaccagtatgaatgtgtatgcatatattcatataggatacagacaaatatttatatttatattcacatttatacacttacatgtatattcatatccagacttagtccaccaaggtgacctagaagcaatgattttgcagtagcagtgagcaccacctagtgacagatcctgatttctaaataccattctccattaaaggcacaaaaacagctccttggtcaaatgctgattccaagactggtacaaggacattacaagatgagcctgcaacattttgtggagatagaaagccacgtgaacaatagagacatgtcacgtaggaaccaccttgaaagggttccccctggccaaatccaggataaattgagcataaaaataataatcataatggattataacccactgaataagatatgaatccatgactccatgctgatattaatgaattaataaatgagagagaagggaaagctctttcttataatacaatgttaactaaaaaatagagaaagaataatggagtaaaaaagtcatttttggatgtaaaactattagatgagagctcgatgaagaataggatgtttgcatagtctaggcatctcccaacaaattacctcttacttattaggttggagcaaaagtattgtgatttttgccattaaaagtaattacttttgtgccaacctgatacagagaggaaaggagtaactttacagtagagaggcctgggacagctcacctaactgctgttttgctgagtctgacttgtaccagcccatgagagccaattatgtgtatttcttcccaacttggtattcagtgatgtcactttggtagctgaaaatagagcatggtggaagtgtctacactgaaaattggtgaatactaccaaagagggatttcctgtcccctggagccctgttgttaaatatcgtctggcacaccaatgatgttaatcaagctatcaaagctaatagcaccaatattgggacaggtgtacattttctgtctaaactcacatcggtacccagcacctccctgccccttctgtctgtattccttaatgattttcagccagtaagcatgttataaattctcacaagttttttcataccaatatgctactatcacaaagctcacaaaattttatcttaaaagggaaacaccttttagccaaaagagttgtatgtctcacattggaacttcagacatcagtaaaaaggtgagtaggaacatggaaggtgggattggtgcttcaaccccacaactaccaggtccttgttccagacttgagcctttcattttttctgtcccagggtcattgttgagctaaatttaacatcattagaaaatgtactttaaaaaatctgcttaacaaatcatttttgctctgtgacatgaacattttttaaattgcaagatttaaaataataaacgatatgaaaaagttgagtatcaaaaatataagcttaatgcttcagtgccgtttctaaaaagtgggatggtaaatatcattgtgaccatttttagaaaatgcaatcaaccagaactataattggtaaaaaggaatgactatgcttccatgtatatgtaatctgtgtttgaggcctagccagtacttgttcactcctttaattctgaatttttatgaagaaaacattgacatggcctacatacgcctggattacaggtgatgtgaataacttggagaataaaggtggatgttcctattctagaccatttgctcctcctttaatttatttatttttatttatttttttattttttgagacagggtctcactctgtcgcccaggctggagtgcagtggtgtagttatggctcactgtagcctcaacctccctgggctcaagtgatccttctgtatcagctccttgagtagctggcactacaggcacacaccaccgcatctggctaatttttgtagttttttttgtagagatggattgcaccaggttgcccaggctggtctcgaactcctgggctcaagtgatctacctgccttagcttcccaaagtgctgggattacaggtgtaagccactgatttgctccttttaaagatcagctttattggggtaaatttaaatataataaaatatcaccaatttctaactgtgcaggtaaatatggtttgacaaatatatagaattgtggaaagatcatagtcataacatagaagaacatttatatccacccaaaacatgtccttgtgcccttttgctccctggtacccctctcctacttccaaatcctggcaacgcggatctactttctgtcccttagtgtttacttttcttgaatggcctgtgaatgacatcataatatatgtctttggtgtctggctttttaaactacgtgtactgcttttgaggttcagccaagtgctgtatgtggcattgttccttgttatttctacccttcctagccatggttagactataccacagtttatccattgaacagttgatgcacgtttaagttgtttcccgttttgagtgattgtgaataaatctttcagccccataactaccaagaaattcttttttactcagtgttttgagtgggaattaaagcaaaccaattggagagactggcttgaccatccttcaccaggctctcacacccagctggatttgactctcattttgttatgctttggtaaattttccccttatacctttcttacgaagtattttgccatctactttctgtttggccattttgaactccctgctaggggcaaggagcatgtcttatctatctttatttgacccagtgcctagcagagtgcctttcacataagagagttatgataaatacttaatgcattgatttacattcttctctagttgctccttgaatgcctacgtgctttttataattttttcaatccattatcgtattacctctagagcagtgtgtctgatcttttggcttccctgggccacactggaagaagaattgtgggccacacataaaagacattaatattaatgatagctgatgagctaaaaaggaaaaaacaaaaaggcccgtgcataaatctcataatgttttaaggaagtttatgaatttgtgttgggccgcattcaaaaccatccaggccgcaagcagagtaagctgtccaactggcggcccaggacagctttgaatgcagcccgatacaaactggtaaactttcttaaaacattatgagattttttttgtgtgattttcttttcttttcttttccttttttttttcccagctcatcagcaatcattagtattagttttagtgtattttatgtgtggaccaagacgattctcccagtgtgacccagggaagccaaaagattgcatacccctgctctagagtattataaaataggattccccaaataaaaacattttaatcctacctctgcctttaaatcattcactatgcaacctataagcagacttcaaattctttgtgacccttggggatttttaagtaggttttttttttccaactgtaaagtgagagggtttgatgaaacacatttgaggttcccttttagttctaacattctgggaatttataaaaagcctaccaagtcagaacctgcaagagaggagagaaggcaacataggaaagtggaaggggaaaggaggttggaaagcaagactatgtcatgtttctaggcaatgaaacataatgtatagtttcccaaatagagggaaatttggggaaggattcgagaaacatcagttgatgtgtaactcaacatttgttggtagaagtcttttaaattgttttattttataaaaaggacttcaattatgacagtagttcttttctatagtcaatttattttttatttttatttatctattttgagacagaatctcactctatcactcaggctggagttcagtggcacaatctctgctcgctgcatcctctacctctcaggttgaagtgattctgatgcctcagcctcccaagtagctgggattacaggcatgcaccaccacgcccagctaatttgtgtatttttagtagagatggggttttgccttgttggccatgctgatctctaactcctggccttaagtgatctgcccaccttggcctcccaaagtgctgggattacagatgtgagccaccgtgcctgacctatagtcaatttagaatatcagtaattaggcagcttattctaaagaatgatggtgagattgacaacccctttacattggggaactgtaagtaccagtttgtgatgggtagtttcagttgtgactgttatcttggtataattattaatagtgcccctttcactttcagatgggtattggtgttggagaatgcatttatgtcacccaattgttaggggttgcagagccccagatttctatctctggctcctgccccggcagggggtctgacttggggatggtctgacagggctttttgtttttttagctgactcctttagcagcacggtctccagctggcagagccattagaaccattctcttctaagcacctttttctaacacgtctgaaaagtttttgcctcctctcgtaagacttaagcagattctccagctacacgttaagatagcagccttcctttcccctatgacaagagtataacaacatccaatcatgaaatattcaccacccacttcctgtgtgccaagcactgaggctgggctgagggtatagagagataaagatgacaaacgaagcagacatgttaaacaataactaaagtgtgataaatactatctttgtacgatgtacacaacatatattgaggtcattgagggaagaatagttaattcaggagagaggaaggagaggggaagaattttgagttaggcctgaagcgggtagttgtatgtatacatcttacagggggattgagtgggcaggtggaggggctttccaggaagaggaagagacatgtgcagtgatccatggccagaaaatacatggtgtgactggggaggcaaaaagtagcctagtctgactatccatttgttgtatatactggtttggaaccgagtgcgacgcaagaccttggaccacatcccggggggaggtgttgttattagaagtaccagacaggaccttatttcacatttagcatggacccccgatgattccatttgagtgaggtgtgggtgtattttcattccagaattttatactacaacatgaccacatgcattgaccaattttaatacaggctttccttatgttgctttataattagaagccagtgaattgaagttccacagcggtacatagactagtagtgatagctttatggaattgtttatttttagtttggcaaaggctaagcagtaaatatctcaattagtaaactaaagcagcatggatgagaaatgcccgcaaggagatcaggagttagaaataactaagtcagttaattgaaggaaaccctaatatcacttacccatatttagagtttgaagaaccattctaatatgtgtgtgtgtgtgtgtgtgtgtgtgtgtgcacatgtacatgcacacacacactgtcagtatccacagtgctgccagcattgaggtcctttgcattccccaggttctaattgtttaggaagtttctctctttggagccactgtgcttggttattgacccagtgggataggtcagtgtcctatcacagtacgatgggttgttgtctgactacagaagcttttcatcctgcaatttctttcaatgtgacccacgagggattttattatgaagtgctgggggaagttattcgtattcatatttgtattcatattcacattatatggcctgatgtgtgaagatatttagtgaaaacatgaatgtggcactgcagaatcatttactcgcctctagatagaggctcctgcattatatttaagattccattttaagtttagagtgaaaacagaggtggtctacaaagcttagttttaagaatttaagttttgttcctagagttccagtatctctgggaaagattgaccactcagaagatgaaacattcattgatagtgtaaaacattaagaatattagagaaaaaagttttgtgttttaaagttacaaaataccattatttagttgttatgatgttttgacactgcacactttagtccatttggattcatggcacgtatttaacactgtatggaaggttgtttggatcttccccctaaagtgggggagggtcattagaaaggtccttgtcttcttatgcttaacaatttactacgtatcagctctctctggtctataggggacatgatgggggtttgtgcatctgcagattaaatttctgtatgtctcctctctgttttgcagacaggaaaaagatagcattcagcagagctttagcaaggaagcaaaggcccaagcccttcaggcccagcaaagagagcaggagctgacacagaagatacagcaaatggaggcccagcatgacaaaactggtaggtggtagggaaagattagagcctgggcactagctcacaagtcaggcccacgccttactgtgaaatgacatcaggaacacctgtaacctttggctggccgaagggagcagatgctaactacaccggagattccgaattacatattagttagcgtttaaaagagaaaatggaaagtattgcccactgtctgttgatttcagagtgctgctctcacatctgttgcaccatctggattatgagtttatttacctgtgttcaagaaacgtaaagctgagagagaccacaacaaagtagaaaaacaaagggcttgtttttggctgggttttcaggcacacatgttatataaagaaaatagcatcagaagctctgcgggaaatgctctgagcttacagttagagtctcctgaatagcattgaacagttcccacagtacacacattatagctactctaaaagcctaatgagtttgcttcagcatccaaactggagaaaagctttagccattaatcggttcttaattcactgtcgcagctggatgtaattcagtggctccaaattgatatgttcctttatttaatctttgcagcttcgaacatttttagcatttgtatgatttccccacctcccccaacccaatctagagtgatgtttaatcctttgcattcttcaagttctcacaactgctgttaaaattcactaatacaaggcactgaccacagctggcagcttggctaaaaattgccatctttcatcacattggcactattctgcagactgagttggccagtaactctttacctttaatttgaaagtaaaatgcactttgaaaatagacagtttgatttgttcagtcagagcattatgtagtttctttcacttttgagttgtgtgttcacagacagtgttagtcaaaacaagacagtgtcagtcattataattccacaccacatactccacactgattgtactattaaaacaaaagtttaattgatcctgtctcttccagaaaaatgttgcttaattttagtgccttgatttattttgatttgtatgctatatgctttttgccaatcattggctaaaattgaaaagaaataaaggcctcttaaaacttatgcttagaggtaattttcatatgatttaatgtattaatatattgtatttgatgacacagtaagaaattatttcttatcctatgggtgaaaaattgccaacaggcaagtcattaaataatctatttacttatgaagaggcaaatgtcatattgactcacataattccctctatcactttcagtagagattttcttccaacagcatttggccagaagaaacgaaaattcaccaggtttagtagaagtttttcctctaaaaacaaaaagaggcaattgtaggataaattattgtttttgcccccactgctagcatgatcctagtgatcagagtcttgggcagaatctaagcactagattagaatgtatttaactgttaaaaccgccttaagaacatttccttttgtcttgtacacacatacacaaaatcacactgttttcaatttctttgaccagatctccattgaagctcatgctgttgacaatgaaattaaaattctaaagaaaatacacatttttaccttcataattagagaagtgtatgcaagattgggggtggtggtggtagtaaaccatgtgtgcaaatatgaaacaaagcatgaattacagtgtagaagagaattcctcgatgattttagttttgagttatctggttgtgataatttttgacactctgtttatagtaaaattgtcaaaataaaaatataatatcttgcatattgcaaagatataagcatctattcttccacttgaggtatttgacactttattaacatgttaaaatgttacaccaagctggtatgatgaaaaatgtttctggtgtataattatgttgaaaataaatgactcccaagattgagtgtctttccagatgataagtcctttgacttaggacattgaaggtgatctagtggcttattggaaatgtgtaggggtctaagcactttaccactctatgtatggaagcactgcagagcgacaaccataaacatcttatgttggtgggggtttattgttatttctagaaaatgaacagtatttgttgctgacctcccagaatacatttttgacaaagttaaaggaagaatgctgtacattagccaagaaactggaacaaatctctcaaaaaaccaggtaggtgatgttatagaatactttcaagagcactgtttgtgtgattactctaatttttccttaaaaaacatcatttgcactgttttatagtctaatgtcaaaattaggtatctgctgatgttttctttgaaaatattttctacatatggacattttcttaattgtctatacgcttttatgttttttcatggttatgtgtatgtactattatttgacatttcaatgtttagaattgaaaactgtgaaatttcaggaaagaaggatcaatatggtaataacataaacatgcagataaatcaagcagttataaaatcttacataggtatggttaacacattttaatctattgttacaattcaccatgaacacaaaagctgtctttaggttaaatgataacagatgaaatgtgtatatataaaaatgaaagtagatggtactttgaaataaataaaccaaaactattcttcccttctcctaaaattgttatattttaatagaacagccatcattcattttatagcatactactcttttataaatccattgattggaatcttaatgacttttttctatacactttctagtcagattatctcaatgaataaattatttcatattctaaactgcaagaagcccgactccccatctcagctccgacagtaactgaataatcttggacaaatgtatttgacctacttggactatagtttcttcttttgtaaatgaaagacattggacagaatcactttaaattgaactatagaaggcaatattcacataactgataagatgtcaaatactactttatatgataactcaatgaaaaaattgcctgtgtgtcttcttttctgcatttttctgaaactcacatagatctattgagagcaggaaatatggctcagcaaacaaactactgacctagatgtttcattcgggaaggatttctgggagtatcagggcatatctgatcactctgagctccatcttggaatcctgcatcaacaagctgtcttagctgatagaacccccatccctgaatcttttggggaatcagagggctcgtgcatccaactctccctgctcaccaggaaggcagaggctcctgtaaccaccaagaatgtactctgacatgcgcaccttcctagcgtatactaagattgtattttggtaggggaaaacctaggtgccaaaataccagatatttcaaggaaatttgaccaagaaaaccaaatgattttgtcatgaaagagacccataaaatatcaacagtagctattcttaaccagaaatacttgatttgcaccacatagatccaaaagtaatttgttagaagcaaacaaacaagattgtatcatttagggataaaatgatatcaatctgggttttatataaatgtattaggtctaaaattggtttgtgaatgattagtgatcttgctctccaaggagacctaattagggaaatttattatataaaagagacaaaaaggtgcttggtatgttatttaattctcaccacaacttgaggcaggaattattatcttccagataaggaaaccaaaactgtttaaataactggtgagtgggagagctacggttctaacataggtatttctggttccaaagtatacgttctttcttatggtaattacagtattttacatctattgctaaagaaaattcaagccacagtagttatgatgagaaagtttgggaaggaaaaattcacctttaaatttccgtggagaagtaagcgtccttggcatgtaacggttaacttactctgtgcccctaggccctctttttcctcctctagatctgtcatcttagcctgtactggtctaactcagaacctctattgctcctcctgcttctcattcctccagctcctgaacagtactttgtaaattggatgtattcttttgtatctgacatagatggcatttaatgaataaatgatgaatgaatgaaacaaataggtgtggtgctattcgcacctcctgatctgacttctgatgccagtctgtcccattgttgatggctgacagtgtgcagtaaagaacacatggcaattcagaggaactaggtttgaatctcactctcccacttggagctttgtaaccttgggtacatggcctcatttccccaaacctcagcttctccttctgtaaaaacatttctaaagccacactgcaggattgttatgggaattagaattgtgtatatagatacgcatacatacacgtatcaagtgcctagcacagtgcctgacacatagtaatacacagtagctgctattattttcactggtggcatttttaagggtcttgactggtaatttgggtatcactttacatagctattgtctttgccagggaaagtctgactgtcattttccgacggacataagtctatgccacaatgaaagcctttttaaaacagccagatcaggaaaatgtggatctagttgtattttgtaactctgatgaattaaagcaggcacctactctaagtttacaatttgactcaaccaaggcctggcaagtagtaaacacttgataaattgttacttactatttttaaaactctcaagcgcccctaaaacttacgaaaagtgcattttgtgtgcctcacaagaaggtagtgaataggacaaattttgattttagggttgtttgttcttaatttcttttagttccagtttcatttctccctggcttcttactatgacattttcaataactcattcatgttaagttttacattccattttgatgttaccttctgctttgaaaccacctataaaacttgaagggcttaaactgcttcttttaaaatacaaattattaatgtagtaaactctgaagaagccctccaggagtgtgcctctgcataccccatgccaaactattgggataaataattttccctgtgctttgaggtaaggaaaatcttggagtttctaaagttttgtcattgtggaaactcagtctccaaatttatacttatgcaatccatatggtaattttggtccagcttttcctcagagtattacagtaaaattcttcttgaaaagtaagtgtatttattttgtattgagcaataattaagacatatttttccttcctctgttactagcaacattactctaagagtcttgtttttcaaaataccaactaaacaaatagattcctaccatttaaaacaagattttaaactcacagatctagtcatttgactgaagcccatgcagaatgacgggaaagctgagagcatgggctcggcgtgcacgtacgcccttactctctgccccagcttcatgctaggctgctctgttgctctgtgaaaatgttttgaaatggtacctccgtgtgtgtgtctgttgtatgtgttttctccccaaggagaccgtaagtcgcattatggcagtgacgactgcttctgttttctggaagcctccatagtgattagcacagtagtttgcgcgctctgtgtactccacactgcacgtagtggtgtctgtaaccccggggtttgtgaatggcacgtcccattttaaaacttaaaatgaactgccgattctgtgcatgttgtatagcttgtttttgaccatcaggcaagagaattaattccattttgcttttaattggcaccaggcagacattctggctgattttagttgaagctcacataaactttcgctatccttccttctgtattccccagtactctgagagcttattatagttatggggttgttttttgaaggaggtaaacggagctatttaaatatcttcggtacaactgtgatttttctttatcaaagtgaaggaagtgttctctctccccacgcgcttagatgaatcagcagtaaaacgttgcagtgcggtttgcagtgctatctaacacctggcctgggagagctggaaggattgggtgctggcagggagtgagcctctgccagccacagagtggagagaagtgtgtgctaggttttagcttccacctcttgcacactgaaaagaacaggatagagcatagaaccagggtctatgtggttttgcttctttcttttctgtcattgtcactttctgggttgtgaggcttgtggactgatgtctaacactgcccattgtgtatttgtgatttgcgttttgtaattaagaggaacaatgggagtccatggggtctcgttatatataatggttggtttaatttgtttcacttctatcttgttaattgtaaattgatcattaagatttgaattctaatctgtcaccagggttgtgagtattgaggctagagcaatgatcccggttttaatcactgatgatgagaaacaaattttataattttggtacatattgcagttcatatattttaacactatactttatggtgttataaatattgttaaatgacttttagtgtagttttactgtgtggactataatgtgtaaattatattactgttttggcaacagtaggtatccaactgtgtgagtttaattgaggtgaagaacacacacccggttgaactgtttttttcctttgcatgtttagatgatgttaggttgggatactataaaaattatattttctacaagaggagactgatattggcctctgctaattgttaccaaaagtcaaactagaacctaaaagaataaaaaattaagatattgtatttccctttgaaagcaattatcattttaatccgaattatagtagtaaaatatatttcatgcaaatgcaattatgcaacataactggtatataaaaatacaggggaaagttcatgcttctgtaaagccagaaattgcctgaattttctatgaaaatggattagagtcaattatccttttatatgacacaggataatcatgccagaaatgtatctcctaactaacagaaaacttgtaagtttactctttgagctttgcaaactactagttctaggaacatatcgtgagctgcagacagaaaaaggatgatgtgcaggcatatatgtcaaatttttattgaaaaatggaagttggtaggcaaattacaattataaacaaagaaaaaaacaaaaatgtgaagcagaaaaaaagattgttgcaatacacacttgatagtgatgtgtactttataaataacatttatatttttgggattatgtaagacatcctcaatgcagggaatttggaaaatacaaagaagaattaaggaaaatttcctgtgccactaccagctagagataactattcttacctctgatatatttcccttcagtcatttttcatgtgtatgtctgtgtacatttatagtgtgattgagattataccgtatatacagttttgcgtctgctttttcatttgatatctaatgaacatttttctatatcagtaaatactctgaaaacaaaactttattaaatgatttgcgtgtataagaattattaggcttttaagatgcttccaatttttaaccgtttatgaataataatacaacaaaaactttgtacctaaatctaaatttttgattgtttccttaattgctggtccaagacgattaatccttttaagggtgttgatgtgttttaccttgctgaagtactacactaacttctaataactgtatatgtagccatattagtaaataacattacaaagaagtgagatttttttaaaaaagcatgagaggcaatattgcacaggtgggtggaaccacccctttagaggtggactaagtaatatctgggcttgactacttggatgaccttaggcaaattattcaacttcatgtttacctcacagagaaaagaaaagaaacccttacaagtaccttataggattaattgagatcatgaatgtaaaggatggatttcactgtttgttatacggtggcatgcagtaaatatttggtggtagtatctggttttgttgtgctattttttgaataatagtgaaattgaatatgttataaatggtattgatcatttgtgtttcttctgtagatattttcaatatttcttatactttttaattggaattttgatggagagtgcagttagtgtttcattaaattatgcttttaatgtttgtcttatttttgtaaataatttcctgttgtttacattgattttaattaataagctttattttttagagcagttttaggttcacagcaaaactggacagaaagtacagaactcccatatattccctgttccttccacacacaacctcccccaccagtgacatctacattttgttttattatgatttttttcaaaatcagaatgaatttatttaaaacaaataaaatacatatctattttaaaaatttagaaagtatggaaaaggatgaatacagaacagagaaaacattcctgatcctaccatccagaaataaccaatattaatagttggtatgcatgtcaaaatatttttctaaattataaaatgaaatcacattacacatgctgacttttaatgttttctctttgttactaatatgtcacagttttagatcaataaatatcacttataaatagccacattatcagaataataagtaacataaccaagctcctgttgatagatttcttggttaagtttccagattatgggttgcaaagaaaggttgtttctagaaacaatgctacaatgaatactctcacacaaacctatgatatattttaaatgtgatttttttatgcataaaagttttgtatttttatattgtaaaatctatttttttctttgtgatttttctttttaaaagtgccttttgcttggaaagtgcctgggaaaagatcaatgttctgcatttttttctaatctggtttaaggattttttttcttcttttgaaatttattttagtgcatggtatgataggagatactaatcttggaagggataccagatcaaaaatttatcataactgcctctaaattcttttgtattgtatgtgattctgaaaggagaaacgtaagtcattattaactcctttcggactatttcaaatatgggtagattcttattaggagaagcaaatgtagattgagcacttgatctgaacttgaaaatgagataatccatgctctcatacagaatatggtaggaaagacaaggcacagagcacaatttaaaagaataaattataagctaatgtatgcataaaggctagaggtagcttcaaaaaacgtgctgacatattgagaactgcaaggtatcaatcagggcaagcttccttttggatgacatttgaaccaagatgaaaacaaaatgaagaatgaggtgaactaaaagcaagagtttttgctccatacacgtgagcagcctggtccttgggatgaacaatttgtaaagtaagatttcccttagcaaatccaaatccttttctgaccaggaagaaaaggctatcttgcctactggaagaattctttctttgaagggaattaattttatgtcaggagtcttcagaaaacaatccaatcattaacctgaaaacgactcataatatacaagagttttaaactttccattctaactgattaggcattagggcatgaggagatggtggcagtaggcagtaatttagagtttacttaatacaaggaaaggaatataatttttcttggataaacatctttctgatcttcaaattttgagacttggattgtcatctaagacacgaaaaacaagatattcccattttgctcaggggaggtcaatcttttttctattaagaccttcagtggattggataaagcctgcctgcatggacggcaatctgcttttctcaaagtttactaatttaaatgttaatatcatctaaaaagcaccctcacagaaatgtccagaataatgtctggccaaatgtctgggcaccatggcccaaagaagttgacacataaaattaaccattaaagaactatttttattttaactgtgtgccattaaactggttatgttaattaaaagaaactctgttatagaaattaggcctagggtttcttctttgacagcatagtgtttggcctataacaagcactcagtaagtatttgttaaatgaatgacagtcttttaaaaaagagatttgatcattatcatgtttgtcttattccttagggaagccatttctgttagagtaagttgttattcctttttctgtctaacacatgagtctctacaatgtatcttgccatttctgaaatattttcttttgcaaaggatgtagttttcattatgctatcatgtttaagtgtggagtttaagataatgttaaggttatataataacaatatgccctagtaataagaacttctaacatctattatttttgtgttttcacctctagatctgaaatagctcaactcagtcaagaaaaaaggtatacatatgataaattgggaaagttacagagaagaaatgaagaattggaggaacagtgtgtccagcatgggagagtacatgagacgatgaagcaaaggtaatcaaggtttcatgtcaactcatgtgccgcatattgaatgtgtttggtttacacactgaaggggaattgctgcggaataagtagaattcatcatcattatgctacttgtgacatgctcaaaatctaatactttattttatgtatttatgcttccttaatttaggttgttcttattatatacaaagaggagagtacatcctctttttgttattctctgaagacatagaattagatttaacatggaagaatggaggaaagccattttcctttaaggtgtaagttggtaatattgtaatatggaggaatttcaaattatctctcctagaaattagattttatatgctttttgtaaggtaaagcacatagtaggtctaaagaggttaaacatcttatcagaggttgcactaatagcattgctagagtcagaacttgactacaaacaaaaccttcacttctttctggtggtgttactttgagcaagtcacttaagttctctgagtgactgtttcttcacctatatattggcgctaatcatatctactttgcattttgatggaaagatcaaatataatatggcaaagcacatggctcataaaggccacccactaaatgtcatcaataattattattctctttttctagatgaagaaattcggctcagagaggctaataggtttgctcaaagtgacagatggaataagtggtagagttcagacttgaatcttgatcttttgactccaaaatccttttctttttgtgcagtaatggggattttttttttggcaataaacacagcctcttactattttttatccatgtgccatttctcacttctgtgtgataatggattccctgggcagaaaataatctcagtatttcacagcagacagtgaataggtttctgtagacttggacttccacatgacaaccgcatgcacgatgatagcagccacccttccagtggacacggttcgcgtggcctccagctcggcatccccacaccatttcccagccatccatgccttctctgtttcaaaaacagttcttgatataattgaaggaaatgaaaatatttatagactccttgtatttttttaaatgtaaagtaagcatattagcctggggtgggggggaggtatttttacgttgattacttgctttattgaatgaagacaggcagtcagatgatggcactgcttgtcagttatcaaaataccaaaatatggatatacttgcaaagtaataattattcattcactattaaaatgtttacttaagcccaggcacttctgtaggccaggggtctgcaaacgttttccgtaaagggccagagagtaaatatttcggactttgcaggccacacgtggtctccgtggcatagtcttccttgttttgtgttttttacaacccttggaaaaagtaaagaccattcttagctagaggaccaacaaaatgagccagaggatttggccattgggccagcctttgccccagtcctgtgcacctggggcatctttccatttattttcttacatttgtgtattgctttagagttcctagaatgctctcacacatagtaccttatgtaccttgaagcaaccttgaaagtagctgcatttatcatctccatttccagatggagaactaagcctaagaaagacaaacgtgccgaatgaaggtcaggtggcaaattaatggttcgttcattcaacattgattgattgattgattgattgctgctgtgtgtcacattttctaccacatgctggaataaaatagcaaagtagatatagttcccactctaatggagtatacatccttatagggaagatggatattagcaaaagaatttcataactgtctaattaattatagttgacccttaaacaacacagatttgaactgtttgggcccatttatacacagattcttctcaataaatttattggaaaattttttggagatttgcaacaatttgaaaaaacctgcagacaaaccatgtagcctagaaataatgaaaagaagttttaaatttaagtatgtcatgaatacataaaacatctgtagatactggtctttatcattgactaccataaaatatatgcaaatctattataaaaagttaaaatttatccaaacttacacacacaaacacagatcatacatggtaccatctgcaattgagagaaatgtcaaatgtgaaggtgcagtattagatcgtaactgcatgaagttaactgtagcacacactgtactaccgtgataattttgtaaccacctcctgttgctattgcgaggagctcaagtattgtaagtatccactgaaaacgctgtgtggactaaatcgtctgcatgtgaacagtttctctctccagtaaattgcttattgcaataacaagtgatctattgcagctcttgtgtatttttcatcatgtttagtgcaatacataaaccttgaataacaccgtgggacccatacgaagtgccactagtgatgttggaagtacttccaagaagcagagaaaagtcatgacgttacaagcaaaagttgcattgcaggatatgtagcttagattgaagtttgcagctgcagccgcctgtcatttcagatgattcatcttataaacagacattataaacttatggcatcaatatataacagtacagtactgtaaaagtattttctcttatgattttcttaatattttttctagcttactttattgtaagaatatagtgtataacacatataacatataaatatgtgttaatcaaccatttatgttatcaatataaggcttctggtcaacagtaggctgttggtagttgaatttgagaggagtcaaaagttatgcatggattttttgactgtacagggggttgatgctcctaacccccatgttgctcaagggccaactgtacagtaatgaccagttctatgaaggagaaatatattttgtggtacaagtacatttaataagggaacttgttttttaaaaaattatttttaagagaatatctcactctgtcgcccaggctgaagtgtaaccttgaactcctgggctcaagtgatcctccctcctcagccttccaagcaggtagggctacaggtacataccaccatgctctgctaattttttttttttttttttttttttgagacagagtctcactctgtcgcccagggtggagtgcagtagcgcgatctcggctcactgcaacctccgcctcctgggttcaaacaattctcctgcctcagcctccggagtagctgggattacaggcgcctgccaccacgcccaactagtttttgtattttttagtagagacagggtttccccatgttggccaggctggtctcaaactcctgacctgaggtgatccgcctacctcggcgtcctctgggattacaggcatgagccaccatgcctggcctaatttttaaaactttttgtgggtactaggtcttgctatgttgtccagtctggtcttgaattcctcgcctcaaaccatcctcccgcctcggccttccaaatctctgggattacaggtgtgtgagccactgtccccagcagggcacttaacattgattaagaaaagcttcaatgagaacatgacatttgaatcggtaagcagtgggattagatcaggaattggcaaactatctggccctctcctaaaaaattttactgactcctgttctagagaaagaaaatctataaaatggaagttcctgagataagaaagcatagtactggaggaagagcaagaactgtgtgtccaacataaaggaaaacagaaagtgtggcatacaatgaggttggagaggtaggaaagggctggacctaaaggcagggtctttatgtttttgtttttattttattttatttatttattttttgatacggagtctctctctgtcgcccaggctggagtgcagtggcgcaatcttggctcactgcaagctccgcctcccaggtccacgcagttctcctgcctcccgagtagctgggaccacaggcgcccaccaccacgcccggctaattttttgtatttttagtagagacggggtttcaccgtattggacagcatggtctggatctcctgacctcgtgatccgccagcctcggcctcccaaagtgctgggattacaggcgtgagctaccgcaccgggctggtctttatgtttttatcatggacctttaaatttatcttgttactaatgggaagaaatcaaaagattttttaaaaaatagaggagatgtgatcagatttgcatttaaaaattgtattctaactccacaatagataacagattggaacagagccatcgtgtttgctcaagaccagttatgggccgggcgtggtggctcacgcctgtaatcccagccctttgagaggccgaggtgtgtggatcatgaggtcaggagttcgagaccagcctggccaacatggtgaaaccccgtctctaccaaaaatacaaaaattagctgtgtgtggtggcgagcgcctgtaatcctagctactcgggagggtgaggcaggagaatcacttgaacccgggaggcggaggttgcagtgagccaagatggcaccactgcactcaagcctgggtgatagagcgagactttgtctaaaaaatcaaacaaacagaaaaacgattagggagtttttggacttagtcaagcaatgatgatgcttggactggaatgctaatattggtgacagaaataaacactggcgaaatgtgtaggaagtagaaccagcaggagttacttgattggcagtgctgggtggagaagaggagcgtgtcaaggacgacacccatatttctgacctgagcaatgggtgcctagtgctgctacttactgagaactagggaacactctaaagaagctggtttggggttgagatggcctgggtttgggatgagatcaagcgttacgttttggccatgaatttaatgttcaaatgatggtaaagatcattcaagttgtaaaaacgaagaaagttaaattttcaactggtggtttggaacccctggtgtccacaaaggcagtccagggaattcatgttaaagatggcagtgccattttttttttctgtttttattttaaagtaagtatcaattcacctatttctccctagaaaatagagctgtgtgaaaatcccccagtgtatacagagtggacaagccccagagccagtggagcactgctgagcacctgtgtcctctcatctgggcgttcactgtcaccgactcccagtaatcccgggggtttcgtcaattacacagttttacaggagttttttcccccttttgtatggtaatatattgtttaaagtatatccataaaaaccattgtctaaagacatgcagcttctgatcgaagtgtaacaatctagtaatgagtttaaaataggtaattcttctataaactagattcaggatgatctttaccaaatccgtaagttctatgtttgtcatagaaatttgattcttcaaaagccaatgttaaaaatacaaattataatattgatttctatctaatttgacattttaatttggggaattaacactatttactattttcagaaaagtgcttgaaaatagaagcctgaaatcttaatctttatctcataatttaaaaacaaaaagagtcctttgcaggaacatgaatggagctggaggctattattcttcaaactagtgcaggaacaaaaaaccagataccgtatgttctcattgtaagtgggagctaaatgatgagaacacatggatacttagaggggaacagaagacacaggggcctgcctgaggggaggaggtggaagaagggagaggatcaggacaaataactaatgggtactcggcttaatactagggtgacagttataatctcttcacaatctcccatgatacaagtttacctatataacatacctgcacgtatacccctgaacttaaaagttttaaaaaaatgggaaaattaaaaaaagagagaaagctgtaacagtagcagttgaattttatattcaaaaagcaaacatttcaaaacaaatcatgaaattgtttttatttgttattgattttataacatgggtttaatttcaaatctatgttttagagtatcttttggtgtgaagacgttattagccaatggtgcctttttctttcataattaattcactatggatttaatttatgtaaatgaaatagtggcattatttattgcacaggaaaattaaaattttatgttacaaagttcaaacttatgcttattttaaatgaaatgcttttacttaaaaagttcctctttattatatataataatgagatgatttaataaattccatgtgtttctatggagggggtttgagagtcaaaagaaatttggagacgctgaggtagacaaagtgcggcgtataaggttcctgagaagagaggtgggttgggataccaagcactgagcagaaaatgatagtgaactgggcgaagggtcacctcctccgttgccatcgcagcagctgtagcagaagagattatatgagctgataaatgcaggcttatggatacggtgctggaaaggtaacctgatgccagacttagtttattctgtgtttattgggcatctgttttgtaccagtcactgtgctaggcctggagacacaaagatgtaaaagatatactctgccttggagaactgcgtgaactcggagggcggaggttgcagtgagccgagatcgcgccactgcactccagcctgggcaacagagtgcaactccgtctcaaaagaaaaaaaaaaaaaaaaaaaggatatactctgccgcactctcgtggctgcagacttcctttctgtttgggctggcctaagtattgcaatcctgcagtgcagagtagccatggcagcacctgccatctcctgggaggtcactcctggctgctgccatgcctccagaaacccagatgcaagaagaaagtctctcctgaggaaccagcctcccttggcaggctagacaggagttggctgcccttaaagtgtttatttgtttaagtctcctgttctctctgttttatatagacctaaaggtctgttattgagatttggagtgtatggtcaaaaacttccactgcccctggggcagtcttgagttgttcatcctttgcttagaaaagtgatcaaggtgtagacccaagctccctgggtagtgatgaccagaagactcaccccgagtataggtgtttttgtcaattcttatggacagtttcaaaatctattaagtaaaaaatttaaaagtactaaaatttggtttttataagccaaaacaacttactgcgaatgctaatgcaatattctactggccgcctccacacccggcagagcttgtgtgatgtaacataagcgctgctagtttgacttttgatgatttggggaaaggattctaattattactaggttatcagcgttgttctgaggtcatcttcattttcaaatgctgctcttcttgcttttaattataaattgctgttaatttagcttcatcacaataatttagtttgttttggattgttttgttaaccccctacggtgcagtattgcatacttgcatcagtggtataatggtttcccagtaactacattttaagtcccgtatgacttgtaatacagaaatgaatcacccattatctcttttgctaaagcagatatatgatccctgcctcctgccaccacctcagcaatttgctgtagagaggcagtcctttgatttgctccttgcaaatgtttgtttttaagtaactgataacatgctattaagagcaaattaacaaaattagatttatatgccattattttataatataaaattatactcttatgaagaaatggtaagagatgtatatgttgctagaaaagaatcttattacatcttgttttgaaatgttccgttatccctagagtttgtttcactggaccactgacatgtttggattagggaggctgtctcatctaaggggtctaacaacagacaatcgaatactagaaatcacatagaaaagtttatccttttcaaattattcaaaaattgtaagccaattggggttcaaacagtccctttgtaatgagccagttgtatgcattgagaactccctgtgaggactggaagtcacgtttgtttatactgtggtgggaaggccagatcagactgctgccctcccaataagttgggagctttgccactctgtgggagttagaattttgatctgggaatggataatgagttatttaaagcaggctgtgcatttaccttagctgggacaaggcagctgctataactgattaccagggagaacattaagtgggaaaaggaggcaacaaaacaaagttgggacaatgccaaagaaatgatgttacacttttgcctgggataggcccactacccaggaaaaagaaaaagacaccctttgatttattcatcaaatatttaccgagtgcttatacactgctgatgtgcttgggatacatcaaaggacacgtagacagccttgtccttatggaacttacatgctttaagctaccttcaagatctagtcctttgtttttaagacctaaagccaaaagtagagagatagtatgcatcgtacgtaacagcatccttcctaaaaccaagttctctgggctttcctcagtttacttctttgtagctgctttgtagctccatgggctaattccttaatcttaaacttcatcttcctcactttcttgatctccaaaatgctaccttgtaggttgtgaaaactgcctaaagtaatccacaaaaaggtctttagaatagttcctggcacaacgttagtgcttaacaaatgtttcacattgctattcattcatatccttcattcaacatatttattaggcccttaatacatgctgagctctgttctggattctgggattgcagcaggaacttcagagacttagattctaaatggttgtttatttatattataggttaaattgactcttgtgagttagtctgtgaaccaaaataccatgtttacataatgttatttctaaggcaaaatgccttttgaattttcaacaactgatttatggaacgacattttggaccacgacttgggatatgcctatgatgttctaagtgtttgtgaacatgtgaatgtgtgtgtgtgtgtgtgtcctctattcgatggtgaaaattttcagtatgagccccaagtaaaatttcaagagggatatatctatctagttgcttctttacaatcgtattttcagcatagttaggaataaggaacactctaaaaaatttttttatgcaagttttaggttcacagcaaaattgaaaggaaggtacaaagatttcccatataccccatacatgcatagcctcccgcattatcagtatccaccaccagagtggtataattgttacaattgataagccttcattgggacatcataatcacccaaaggccatagtttacattagggttcagccttagttttgtacattctgtggtttggacgaacacatgatatatctctaccattgaacatgctctgtatgatatcatatcatgtttatcaactttttttttttttttttgagcagtggcaaggttttttgtgaagagcaaaagaacaaagcttccacagcatggaaggggtcccgagcgggttgccccaactttttttcatgggtcgtacctttggtgttgtagctattgtcctacctgtggtcacctagatgttctcctatgttattttctataaattttatagtttcgtgttttacagttaaatctgtgatccatttcaagttacgttttgtgaagggtgtaaagtctctgtctagattcattctttttttgcatatggatatctagttgttttagcactatttgttaaaaactctatttttgctctattctactacttttgctgtttgtcaaagatcagttaactacattcatctgagaggaacactctttttaaattcctaattgtaacttcattaagtctttaggaacagaaaaacaaaaggctaacagagtttaacttctactcctgggagggaaaattttatattagtactaggaaataactaatgcctgtttggaggcaaaaattctgacaaaccatctataacctgccaattttaatatttttataatgtttattatttttgctttttctacaattaactgtggataatacaaaaatattcaattaataataattgctacacccatgttagcattgtacaaagaaccacaagaggctgtgagtattaaacacctatctgtggaaaggtcttttcgcaaaaagacagaataggtaaatttctgttcttatatcagaggggaaaaaaggtacatttcagtgctgaaagtccctgaaaaatttcttccatatatccaatgtaaacctctttcagtcaattcactctctaaagctgattttctctctttggtttatctttttggtagatccagaactgattagaattttcattatcttaactcttaagacttaaaatttaacttagaacttttaaattaaatctgatttttcatttctgtagttgtgtttgttgctttgccttagactctacaattttaaacattgaatattaaatgtgaaaacctagattgcctgtcttttgctttattttgcaccttctaacttattaatgtatccctgtatttattaacatgcattcagcactaggtacaaaaggaaaaaagacatgatatttcccctttagaagcttcgaatccagtgcgggaggtatacggtaatcatacaggtgtaatagactacggtaagagtaaacccaggatgctctctgtgtacatcagactggcatgtcacccaggtttggaggtacagggcacaattcttttgagaaataatatctatcgtcaaatcctaaaatgacatggaggaattcttttttttttttttttttgtattgaaacagagtctcgctctgtcgcccaggctggagtgcagtggtgccatctcggctgactgcaagccccacctcccgggttcacgccattctcctgcctcagcctcccgagtagctgggactacaggcacccgccaccaggcctggctaattttttttgtatttttagtagagacggggtttcaccgtgttagccaggatggtctcgatctcctgacctcgtgatccgcccgcctcggcctcccaaagtgctgggatgacaggcgtgagccaccgcgtccggccagaaagctgttttttaaacattaaccatcacaccactaatggattttgcttttgccctccctcagtgacagttcacatttttcctaggatcagggcaacaggtttccacccatttcccagaggaagacagcttttgcctctcaccttctcctggaggcagtgggcctttttcctgagaaggtttcttgcccctcccccgggagcttgaggcgtttgcttcatatgaaaaaatagtctagtcagtgggcagtggatgtcctcatgccccacctcggagggggaagctgctcgtgggtttttttgccccgccttcaatctttcctgtgcgcatccggggggaggaaggctgtggaaaagtgttcaataatgagtgcaggtttctcttgtcctcttgtgtttggggctcccatggattccaggctggcacactagcccacactttaagaacccattaaaaggttggctgctttccttttatctacttttacagtggccatttcccctttccttgctatgccaaagataaaacggttcaattgttctgccttcagagagtcatgtcaccttttggaatttacatcagctagttaccttgcaacctcagctctctgattggctcaagaaaaaatatgattttgaagattatctggcttttgcccattgttagagtgggagtgattgtgtgtgtgtgtgtgtgtgtgtgtgtgtctatgcacacgtgcgcgtgcacctgcctacctcctagtaggaggtagacccctcagaagttagacctggaggagtctttctcttgaaccatgtaaaaatgtttaggatttcttctgagcactctgagaggggcctttgaagggttttaaacaagggaaagacatttctgtgatgttagcgttttcagtaccatgaggcttttctcatacttggtgagccagagtggctcctgataactttctgctgatcatggcctatctttaactttgcagtttgtttctgatctctgagtttattgacattttcaccagtgattttgctcgcattatccaactacttccattcctatgacattcctctggtttgtatctttccatatctgttttaagatatgttaactaaccaagtgagtgacttcaatgaagatgctgccaattccttcattcctactgtcttagaacctgtgcaaggattaaatatgaatgtttattttggctgtagtccctgggcagtgagagtgagggaatggaaggtgaggcgtggaagaatggaaaacaatgtgtgataatgtgttacaatactggtgactgcttcttcttttatttttattttattttttattttttgagacagggtctcactctgtcacccaggctggggtgcagttgtgcagtcatggctcactgcagcctcaacctcctggatttaagtgatcctcccacctcagcctcccaggtagttgggacctcaggtgcatgccactgcacccagtttaccattttaaatttaatcatctggccggccgcagtggctcatgcctgtaatctcagcactttgggaggccaaggcaggtggatcacctgaggtcaggagttcaagaccagcctggccaacatggtaaaaccctgtctctactaaaaatacaaaaaattaaccaggtgggatggtgggtgcctgtaatcccatctactccagaggctgaggcaggagaaacgcttgaagccaggaggcggaggttgcagtgagccaagatcacgccactgcaccccagcctgggcaacaagagtgagactccatcacacacacacacacacacacacacacacacacacacacacacatcattggagctattctgtagagatagtagtattgccttctgtttctagagggggaaattgaggctctgagaagttatataacttacccaacatcacatagctaatatgtggcattgttagtctaggaatgcagggctatctgatgtcagagcccatgcttttaactacctgagtttccccagcaagccagcctctcagcggggcttggactacaagtgacagtgtttgttacatctaagtcaaattctctctctactaggggcctttcaggctaatgtgtcttagaaagcttcccaggttgtagcaagactaaatgagcttttaaaaagactttttaattgctaatggagcatatggtgcataatggttaatgatatgcagtttccggagctttctgcctgggttctagtgccagtcccaccactgaacctgctgttgaccttgtgcaagttacttcacccctgggtgagtcagtgtcttcattataggagagaaaaacggaaaaggtcccacctcatagggttatgaggcttaaatgagcttagcatttgcctggcgtgtacaaaacgacgtatgtttttgttaaataaaataagttcttcggttttattctgcaattcacacttaatagtatatcattattaaattaaaaaaaaaggaaaagaaaaacattaactagcaggtcttcctttaaaactaaataagctctgctgctagacaggaccctgcttttgtctcaggaaacactgaatttcaggctgcctttgagaggttttgttccaaggcagacccttttcacctgacttgggaagggcagttcactttgcctgtcggagagcctatgggtcagttccaggaagaattccaggaattctgggaaatggctggaaggcattgacatggggttggagctgtgtgtaaggccctgtaggcagcagtgttccaattgtgcacttttgatgttgcacaaaggattgaaatctagactcagtcaaacataatgaattaactgctttgtgggataccatggctttttgacatttctttggtaattttgaacaaaataacttctgaggtgattacataaggaaagcaatgcctttcgtgcttttgaagagtgttttcctttgttgagctgaatgtgtatatttaagggggaagagcagtttcgtgcattgttttggccgtgtgtagcatgcaggctgctggtgatgggaattgagcagattaaagtcaatgtttggttttgtgataatatcttgatgatctattcctggtgatattttctgggcttttgttttctagaaattaattggtttaaaaatggccattatccataaaagaatttattttgtatatgaacatgggccaaaccattttctccttcttatctatggaaaatagtcagctttaaggagccggtattttaaaggcattttgtatgaatatagaaaaacagcattaaagaggcttttgagtcactcttttccaacaaatgtaaattttaatatttatatgttaggcaaatgtgtcattaaaagaaagtaggcatccatctagctgatgtattgctgactctggctgctaagtgaagctcacacagtcctctgcaaatgtgggtacaggggatggatgggtattaagatgccaaacgtgctgttcatgctgaattgttttctaaccagcccatggtacttctctgctatttttttatctttttctttgtctgatactcccctcaattttacattactttcctgctctcttttcacggtcctgttgctttggttcttcatttctagaatactctcttcatttctagaaggaaatctgtggtcagaatttatgctcttctacagtaaaatggtaaatggtgtgcctaggagtagcattttcttcaaattcatatggctagattttattacctaaaatctgagatgtactaattagggaacaaagaattttaatcaaaaatctagttgtcagaaaactctaggtttgttaaaatatatatatgtaaatataggtacagatatatcatacagactttggagtatcttaacattgagattgttttatacaagtcagatcagcacataggaggagtcacaactgtcattgatcataatttatgaccctttctagactttctgaatgttgttatagaaagaaatgtcttatattgagcttgattctttaacatcatagaaattcattcagaaaagtttgatgaataacagaagaaatctttattcactggcccaaagcttagtttatattctgtgctgttataacatctatatgtgtgtctatattagtactatcagctctctgtggcaaaaagaggctctttaaagatggaaactattataataaaacttcgtatttttacaaaatacctcaaattggtagcattcaaaatgaattcatgttggttaataatgaggtgtacattttgctgtgtaagtgaatagatcatcatattaccccaagaggtgatttttacatctatatcaacagtgtttcttgagattgaggaattgtgaaaaggattttagtagaagggtggcaatttgcagcagatgtgtatctgcacctctggtatcactggttgtaattgaacaataaaaatgttgcaaccgtctgggtagcaagatggctaaggtcggctcttgcctgtgatagtaagaatggaggagatttgtttgacgtcatagactctggattataagaaggagacatgtcaagcagtaactacgtggcatgtggctgtgatgcgtctacagccaacctcctggtgtggccttcccaaagacaaggaagcgtcccattcaagtgtgtctcagtgcttgcatgacacagtgcctctggattttacgtcagttctgccttcagtgtaaagccctgattttcatagataacctaatctgtagggaaaaagaacattaaaaaaaaaaaagtatagccacaaaagttctttccactcatgtgtggatctttccagttttttcagacagaaaccaaatgacagcctcacagtcacagaatcttccaacactgaaagttaaagctgatttcttcttcatggagaaaagcttacaaaccttttcagactacttctttagtgtcaattcttggaaccacatcttcttcctgatttaaatgtttggctgtgtacctccagctagagctattagagtttttgctgatttgcttggcatatctccagcaaaatagtccattaaaattcaaatcctttcccaataattgagacaatcaatttacattaaacaaggcacaaatataattttatgtacaatttaaattctatagaaaataatcagtatgcaataaagagggacacttattttgatgcaaagagatgtttttctagtctgcattaaacaaatctttcatattttcaaaatagttccctcattatctttgtgtagaggagctctattgtgttttattttgatgtaggaacaagtgtgtgtccatggctgcatgtttgataagcagtgtaactttctctcagtgacatgtaaagggaaaggtttgagatagaataaggaaagtatttgcttgctatttaacttggaacaattcatacaaaaagggcgaagaagatgcatggggaatttattgcctttgtaccagtgttagtgaaatgggcattgtttgttcatcttcacctgtttatgatacaccaggtggttgttgctctgccagaggttgtgtgttaggtcctaggcaaatcactcaatgggacttgggaaggttgcataggatgggggccatgtgcacacacataattgtgtgccttagtgcagaagagttcctgggaaagttttaaagccccagcaggtaacctcgcaaggcagctagaccccaccagtgtgcctgaatcctccacagttctcatttgtaagctcttaatgagactggtattgtcggtcaggaaatctagaacactggagaaatattattaggaagaatatagtaaaaataatgacaagatcgaaaacaaatcctgtcagagcccaagaataaatttggcttccgcttgctgtgtctgtctgtttccataatggtccagaatagaaaccggatgtttaaaatctctctccttttcacatgctctcctcccctcctgtcttccttcctcttcagtattagtagacttactatttttattattttttatttatattcctagttttcaatatttgccatttgtgtggataacacattaatttttaatgaaatattttcagactcttggaactcttggaatagctgaatcataaaagaaaacttgaaattgatatagactccaaggcagcacacaaactgaaaattacgcttgtttttattcttcccactgacaaatgacaaatggttatttgaaaggatcatgtgtacttagatttaaacttcttatgtttctatatgagcctagtttgtataatttttgtggcacagaaggtaattcagacaccattttaattaataattaaaatgaaagaagcagcaaaacaatatgtgaggtagtgagctccagtaattttctttttatctagaaatacttatttttgacaagccacattgctagtaaaggaattcaagtgtgatttagattacgtcataggcttaactttattttagttctgttgcggcactaaagtttttttgtttgtttgtttgttttgtttttttttttgggatggagtctcgctctgttgcccaggctggagtgcggtggtgtgatcttggctcactgcaaccttcacctcccgggttcaagtgagtcttctacctcagccccctgagtagctgggactacaggcacatgctgccatgcccagctgattttttctattttagcagagatggggtttcaccatgttgcccaggctggtctcaggctggtctcaaactcctgagctcaggcagtccgcctgcctcagcctcccaaaatgctaggattacaggcgtgagccactgcgcctggccagatctaaagatctgaaagaaagtggcatttgtttctttgggtaatttatttccaccaatcaataattgttgttagtgaaattaaagttaatactgaatattatttaattttatactgcatggtattctcagaaatgcaactttgtaatccactttggaactgtaaattaataagaatagtttcttctaaaagtttgttttttgttatagatagcatggacatttaagatataacatcttttagatcttttcttattctcaaattataaggatatcaatttctattttatgttggcaacttaaatcttattttaatcatttatatatgtggttacttttatattttcttcttttaaattaaaattcctaaaaaagtctacttatctcaagtaaatttacttattctcacattaataacaaacatatttttccaaatattattttctaatgtatttctaaagactaataaatttttaaggagctctgcctgtcttatatgacccgagttatgtagaatggcattttatagaatcagaagaggcctgaaagattatctagtccaacttcacctcttgtcgtctactcccaccctccattcccatccccatccccagcaccacattttatagataagaaaacggaagcccaaagaatacaagtaatgactcgaatccgttttctgacatcaggtctagtgttttctactgtacccactcaataacttatatgcttccagaaatagggaggtggactagtactaatgatgaaaaggaaaatatacaatggacataaataatcagatgtttaccagaagctattttgtccagtgaccttgagaccagaagttggatggttaattggaaggtcaaaaaatacatgacaggtgatggatatgtggggctgaggcatattttttgtgtgtaaggatcacctgatttggcatgccatgtcatttgccctggataaacaacacccaaaatacatcttttattgcacccaattttgatttctccaaactaagtgaggacataaagacacttgggaaacagccttcatgcagaatttgctattttaatggcccttgcccaccaaatcttttacatttatttcaggcacacctaattggacaaactttttgtgttggggggtggaaattcagctttgttgaatgcttctaaatcactccactgcgttttcatagaatcagcaactctttttttaacaatcatacttctgaattcagcaaacatggaattacgtttatgtaagcagcacacacaggcttgggaagaaacatggctgactttaggaagtagagcacaactgttgggagcacaagcgcccatttgtgctggtgagtagcagtcattggccatagcactgagtgtgccgtggacatcattcatgtgtttgacagagggaaaaggaaagggttagttgttgggtgatcagggtaagtggtgctccatttagagagcttctactgtactttggaaggaactacctgagtcagacaagtaaagatgtataacataataactggttaagaagaatgtgcattgcattctccatgcactatctttcctccttctttttttaagacagggtctcactgtctttcttgcccaggctagagtgcagtggcactatcactgcttactgtagcctcaacatcctgggataaattgatccttccacctcagcctcccgagtagctgggactacaggcatgcaccaccatgccggctaatttttgtatgttttatagacacaaggtctcactttgttgcccaggctggtctcgaactcctgggctcaagccatctgcccaccttggcctcccattgggattataggcatgagccactgcacctgaccaatttttttctttgtgtcagagaaaggccaacttggaggcagaagaaagggaactttatctgtttcctttctgctttctctgttcctggcttaagaacatcagcctcaccccacccagaagctgggccagtggagcttttatatactgagcaaaccatccatagctacttggcaataaaagcatcggccactgttcagcctggagaatatacctcatgtacaggttttcaggtgacctgctgcccagttggggctgcttggggctgcagccaggctttctcggatggggacctgattgactccttgcataaaagtcatggaaggactactttcttaggagactgtatggctgaaaatacaaatagcttcaaatgggtttaggaaactcttggattaagaacccatgcttggccgggcacggtgtctcacgcctgtaatcccagcactttgggaggctgaggcgggcagatcacctgagttcaggagttcaagaccagcctggccaacatggcgaacccctgtctctactaaaaatacaaaaattagccaggcacagtggccgtgtctgtaatcccagctactccagaggctgacaggagagtcacttgaattcaggaggcagaggttgcagtgagccgagatcgcgccacggcactccagcctgggtgacagaacaagacttcgtctcaaaaaaaaaaaaaaaaaaaaaaaaaaaaccatgcctcattcttaaaaggcattatgaatgtattaagtctcatcgctaaatgaggaatgaacaaatcaataggtaatgaacaactattctctctctaaattgggtgaatataatccttccacttttccttttattttgggggaggaaggggatctgagcatccattctatttttcttccttaattaggtcttagtatctatcaagatggtgattatagtgtgtgtgtgcttgcgcacgcacacacacactatcttacataactgcctgtttactcctttgctacactgtgactcaaaggggtggggcagcacttttgcaaatgtgttttacagacaatccgtccttcacagatagtctttgaaaaaaaggtttgcatgatatcttagttttggaacatactgcataaactatgtactttttagagagtcagaatgtacattaggatattaaaagcattgataagtcttcagaattattaaccatttttaaaatttaagttatagttcaaataatataaataaaaatatttgtaaacatttaaaactttacaaagaagggtaaggggatatggtgtgaagagctacaaacttccctgtggggtggttcttggagacatgtcaccaaactaagcatgtaaatggcttcctgtggcatttcttagaggagctaaatagtttctgcgtggctttgtgatcatctttcacccttcctgtcccaaccgtggcttttattttggctttatttcccttatagcatagtgtgcagcaggattcccgagtccttgcttcctaactcatgggttgggagagctgctcatggctgtagctgctgcaggcacccgcattgctgaacaatgggaggtgtcatccacaggtgaagcttgaggtgtggttcatccaggcttctgggaccttgtcaaggcatagatttagacagaaacaggtcctccagggcttggttatgtccattactaaatctggctgtagcaaacaaggagagtaaacatcttttctttatagttcatgagctctgaaaagggattttctgttgttccgttcttctcaggaatctagaatcaagtgtgaataaaagtagagaggtggttggtgtttgttcatgtatttattttatttatagttctttcactctacatacatacattcttcagatatgtattgtgttctaacaatggtaacaggggcctgtggtaggctttggggttgaaaagatgtgtaagacttaacccttgtctctcagaattcacagtccgggtgctcgtgcctgaaagaccttttcctcccctgcctagagacctcttatttcccaagacacaggtcagccatcatctccagtacaggcttccttaatgccactctctgtgttactcagcacttcgttcagacagcagtttgctcaaatgtacaggacattataattattctttgactgtccaacttgtttagactgtgactccttaaggacagaaaccatactctggtcatctttgtatctcttgcctatagttcagatcctggcccttagaaggcatttactaaatgaatttgtagtcctttttatcttctttttaaaaatcatcatattttatcatcctttttatctcctaaaattgtagaagggtaaaaatgagacaaaagcagaacttgatgtgtatgtgcaacatttaaaaaatattttataacctctcatgtatatcttcatgtttggaaaacctactcactatatgtgtgtctaattactattatgaagtaataaaaatctatagttttattgtataatgatgcacatccagtggacactcagtaagtgttaatcacactattaaatatgctttgatctcattataactggagtggctgcctggctctacttaggctatttaacaactcattgtgttattagttgatccttatttttcaaggtttgtaggtcatgcttaatggagcgacttgctaaggttgttagcagttacataaatgactctgactttacaaattttatgataaccatttggaatgaattatatattttccaagcttttggttcccccagtggctgatacattaaagaataattggtaagttgcaaaatttgtgacagttttgtttttaaaaaatcagctaaatttggctttttacatattgctagtgatttctgtatcatagatgaaggagatagcatagacttgaggctgggaaacacgtttcttctttcacatagccaggcagaacagcccttggaagacgatccttggaaacacattatcatttcttgttcaaaccaaatatacttaacttctgtatctcttccactttaaaatcattatttttgtgaccgacgtctggaagtgccccagtttttccacatggcccttaacacatagtgttagtgttgcatttcgtagttctcattttgaattatgcctctgtgttcactagcagggttacctcctgttaggcccgactggaccatggagtcctgggctccttttggccttttgcctagagtagggaggcctcagtgactgcaaatgtggcaactcgggcagtcccttggccctttccccttaggtccacactcccatcttgggattctgtcttttccacttcaataaatggctccaaggaagagcttgaaaacgtatttggatctgattgccaaatttctcaccagaactattctttcagggtgggatttttgaggttgggtaggggcagggttaaaaacatgagctttctctagaggccaacattccctgattctaggcagttagtcagaccttgttcctatggtagacgtctctgttttccagcacttagagcactgtattcatggccttcgatgtccttctctcctcattagattgtgaggtcttcaatgtgaaccatgtgttatcaatctctgaagtcccagtgtatggaagtgtattgaattaatgaatgattctctaggaactgacattgttttcatttaaaagttgttaggtaatggttaggattaatataggctgattccatatgtgtcctcagttctttccaccacaccattagggtttgaactcccctggcttcattagctattttgcaactcctttaagctgctgtatagtttggttcatttgaaacagaaaaccagcgaaaaatacaaaggtgattgaatacctattacatgataggaattctgcagaccttggagatatggaagataaatcaatcactgacttccagggattcttgtctcgtgggaaagcatgtattctagcgttgctagcccctgttttagtagagatatgagtggacagcatagggtatgtataacctgtttatttttgtttgtttgttttgttatataacctggttttgtttgtttgtttgttttgagacagagtcttgctctgttgcccaggctgggagtacagtggtgccatctcagctcactgcaacctctgcctctcgggttcaagcaattctgctgcctcagcctcccaagtagctgggattataggtgtgcgccaccacgcccggctaatatttgtatttttagtagagacggggtttcaccatgttggccaggctggtctcgaactcctgacctcaggtgatccttccgcctcggcctcccaaaatcctgggattacaggcgttaggattaatatagcatttaattctaaaatgctgctaaaatcacttgttgaaaaagaagtgtttattgatatgacaaaatgttcaaaatatatcccctaaggggaaatagggtaaaagtagtatacattatttcatcttttgcatacacagaaggtatatagttatagatctatagatggatatgtactgcaaatgtcacatcttcttcatactctagcttgtgtatctcacacatgtagactcaaattttgccccatgtcagtttgtacatagagctcagcatctccttgagtttccctaaagatttcataggcacaaatgtactgctgatcagcatggattttactgaagatattgtaagatggaaaacattcatgccatacctcccttagaaacaacataacaatctccattaatacttagttctcccctccatagtcctttcctgggtgcattcccaacttggaacttttttttgtcctatctcccgctttccttaaccctataactttctaattctttgccttctcatatttctaggagccaaacattcttcacccccttctattatgcagaaccatccagttctgccacaactcttgtcttaaatggacatattcagagtagcctgcttcttgagtaagcacacattgtacacacatgcatacagacacttacgtatatatactaaaggaaatttaagccaggcccgatggctcatgcctgtaatcccagcactttggaggccaagttgggtggctcacttgagctcacaagttcgagatcagcctagacaacatagagaaaccccgtctctacaaaaaaagaaatacaaaaaccagccaggcttggtggtgcgtgcctgtaatcccagctactcagaaggctgaggtgggaggatcgtttgagcccaggaggcagaggttgccgtgagctgagatcacgccactgcactccagcctgggcagtagagccagactttgtctcaaaaaataaaataaaaagttgattgcggcctgctaaagtaattttgtgacccactaaagggtcatgacccacagttaaaaaacccttccatcaaaggccctttgacaaccacacagctgctgaataaaattgtgtccctcttgttacatctcgttacacctgcgtgtgcatgctcaggcgtttccatgtgtgtgcacacacagacagacagtaggccacacaccagaaaggaatatagtagtgctctctgggattactggtgtgccttcttccactgcactttctggccatttctaagttttctgcactaagcatgtgttagttgtgtaaaaggaaatgcaaacagtaacaggctcagttggggtttttcgtcttcccctttttgttacctcccctagtaacccttgcaaacagagttagactcctctatctctttctctgtcatacctttttgacttctccctacccttgagatgatctcatctcttttttttttttttttttttttttttgggacagtatctggctctgttacccaagctggagtgcagtggtgcagtcacagcttactgcagcctcgaactcctggcctgtagggatcctcctccctcagctttttgagtagctgagactgttaagtgtgcactatcacacctggctatatatatatgtatatattttagaaatggggtcccactgtgttgcccaggttggttttgaactcctagactcaagtgatcctcctgcctcacccttccaaagtgctgggattataggtgtgaaccaccgtgcccagcctgcaatgagattcttacactgaaatgcatagatgggctgtgaaccttcataaaatttatataaaacttaatgtttacttatttcttttctgagaagcagatccaattattctgtgagggcttctgttgtgccaggcaaggttctaggtctgatcctttagcagcctctcaaaacgttgaagaactgagtgactcttcttactctgttgttttccttctctgaactgtgagtgccacgaggcaaggacttcatccgtcttgttcatcactgatttcctgctgcctagaacagtgcctggaacatagtaggcactcaaaaagtgtagtgttctgaatgattaggcattgtgaagtagaaaatacatttatcttatgactctccttttccggagttgatgagatatcatgatgttattggagggtgcaggaggtgatcaacagtattctaggactttgggaattcagactggggatcacaaaatttggagcaggtttcgcttggcactcaggtgggcatctgtctccatcccaccggctgtactctgcagtggctggtaaattacactcttcttggtgggcttgaggccccagcccaagactgcagggtcaatgcaacataaaagtccaggtctcctgactcggagtacagactatggcagcactcctgagcttgactttccctgggcttcatttaatatggttcattttgtttttgaaggtagtttgtgccatagaaaccagacagggtgttgtttaaatagtaggctgatgtctcaatgtaacatattggcccactgagctctacaagagtgtgaatcacaaacccgcctctgtacatttctgatacagtgtgaatgttctggatgtaagaaaatcctgttaagaatgatcaggttatctcattttgccatcaatcgtattttgaaatgttcggttgatagaataactgctcttcctggctaaatagattctctcaactccagcaaaatatttttaaaatcaggtaattcagccagtaatccaaattttatttggtttattttcttcagactgtatatataataccaggactgagtgtttaaagttcagctcagtgtgtagtattcctgtgataatttcagcacataaaataagatgtttacaaaagccaacctgagacctatattctccagcagtttagcagcaaattcctactctgggtatataacaataattgggatctttctattggctttacataaactcagattagtagtaaaatctaagtaccatcccatttggcaaactcttaacttcaagcagtcacaaatttgcttctgattgtgcttttcattcgcacctagctcagatttttgcctgatgcttttttaaatcctctaatttacatactgtggtaaatttaaaatgagaacagatgaatgctgctaaacttttctatttcactgatgaatatggtattttgctttaactatctagctgttatatattcaatgacctttaaaacatgaaaaagatacttcttttcatatataccgtgcaagatgaattattagtattgtcttcctttgaaactatgaaactgagacacagaggccaagcagagcatctgggaactgatttccacaggcctaaaatcagagtttcctcttcccgggactcataccccttcagccaggcagagaggcctggttcgctcacgtttggttatcttggaactgtgggaggtaatgcatccactcggaatgcacttctttccttaccccacagcccccgtgcaccacagcctacatcactgtacccgtttgggcatgtcggaacaagcacgagtaagggaagaggtcgccgtttttgagtggctaataggaatctgctccagctaagcatatgttatctcacatattgtggttaataataataataaccgtgttctccaaaggagccaaaggagagttggagaagttacattattcaacaactgagatgtctaaagcctgtgctcctgtactatcttctgtttgtccctgttatcttgtttagtgagcagcatagcattttgcaagagtggaccgttcacctggtcaggatttcagtcagcatgacagatgcaccctccactgtggtcggtgtctggggtaaccagagaaaacttcccagatacggtagaaataaacttcccagatacggtgggaataagcttcccagatacggtggaaataaactgcttgacaaaatgaatagatccaccatgacgtaattttctaactgttcatttgttttcaataaccaaaagcaatattaattttgaaattatatacactacttatgattaaaatgctgtaattcataagacaaggaaaatctagggcacattttaaaagaaaagtttaattttgaaaggaggaaatctatttcagaatgaagaaatgaaaacttttgaaagctttaacaaaaaattcctagggaattttgaagttttattttgccctaacatgaaaaagtaggccagttgctaaacgttaattgctttacttccatctatctttatttttgtttttattttttgagatggaatctcgctgtgttgcccaggctagggtgcagtggtgctatgtcagctcactgcaacctccatctcctgggttcaagcaattctcctgcctcagcctcccaagtagctgggattacaggtgtcggctaccatgcccaactaatttttgtatttttaatagagttgggtttcaccatgttggccaggctggtctcgatctcctcaccccaagtgatctgcctgccttggcctcccaaagtgcagggattacaggcgagagccaccgcacctagcctatttccatctatcttgatcacacttgatcatgttgagagactagaggctctgaaatttaataaatgacctaattcaaaatatcttactccaaatccagcttgatagaaagccaaactgttgtcagtatatctcactttaagcaaacccaacatattaaatccatatttacaaaatggattagttaagtagtcattcttcacttagcaacataattcattatagtaagttccccttgtaatgcatataaacgtgatttactttattagaaccctctgtgtgtgccacatttcaagtgcaaagtacatttgataatgttactcaacaaattattttctcatttgtccaaatatttggttgggcatcgctgtggcccctaaggaaacaaacaagtgggtcagaatggcctctggaccgaagggatgcgtgttgcaggagcaaggactgttggcgtgggctgatcgctggtctacaggctgtgggagctcagagcatggacccagtcagttcagtctccatcatcctagttttctggatcttccaactccttattcatcgaatgaaccgggagcatgcagaatttatcttggtggaaagcctttctcctcagttttctctccctgttttggtttactgaacaggaaagcctgacataattaggtctgagaagagtcatcgggttctgctctcatccttgagcctgccctggttggtagggaaattcacttattaattctgtggctggctttgggtcatgcagatgacccagggtcactgggcttttcaggttatcaaaagctaaatgacgtgggacacttctggggattagtttaacgaagctgtacaaatatagtcagatgacaaatttggagatgtagtggcagagtaaatagtatttttaaaaaatgcatgcctctgaatgtaatagtaaacctgtatgagaggctctgcttagagagaaattagagtgagctattagctgtgcctatatgtttattttcatataaatacatcaagaaagctagattttttgcttttatttttataccaatatgcctaggttaaagtgggtcattcccagcatttaaaaagggggtagagggagggcaattggcttggttttggtaaaggggtaggggattattttttattttattgtatttagggggcaatcttccatctttatctcttcgttcttgtgcttttcctggaccatgtattctgatcatatttaactttctattgtagaattgggatggaagacctagagttcagcttgaaaatcttttggtagatgctatatctttaataaatgttaaatacaggcatcacacttttaaagaacatttgtttttaagggtctttgtgcattcatctgaggaaaaagcaaccaaatctgttttattcaaattccaaattctaggggagcagattgtcacagaatatacagtgatgaacttccaaaaaggaaaatgggcggaagactcgtaggtatttatcacgcatgctagaaacattaatgctttctgaggaatcaacagatctttgattctcttttggttgagtgcaccttattttgtaaaaaaataatttattgattatttcatatttttttctttaaggaaaaatcttataaatattcatattcagaatagcatgtgtctattctgttgatcctgaagccataaaagaagtttcattctcagtgtcatgtcaacaatgaaaattatcacaaaaccaaaaataattcatgtaaatgtccgcattgtttaatcatcggttttagatccaaagcatcattctttctgtttaaagtggtcattcagaaccgaatattttaaatgacttataggagccctgtagaaaatgtacagaaagaattcaccgtttaagtaaaaatatatttgctttgcttggcctgtcagtttccatatttgcagtggcttcccattattgactagcatcatgcattgaggattaggttgtcaaatgcggtgtatttacttttgaacttctctgctggtaacagtcggtgcatacgtgacatttgtaatgctgatggttgatttcaaagtatagtatctaagtccaatttttcatgcattttatgaagcttttgtccttaacactttgatttaagtcgctcaaaattcattcttaaaagagagatcatttcgatgtttacataattgcaacctcaagcgtactttgcaaatttcagctggcactctccaatccctctgttaagtggttatcaagggtggttattaccatttacaatatgaggaaaccaggagacagggattttattgacttatactgtgaggcagcattgctgctagtctgttaatatgtgttttcgtctcttttctaaacagattttaaaatttggctataatatgttaggcatcactctctggcagaaatataattgtcaggtgtgctggtatggatagaggtcctgcagaaaccttcaggacccatcccaaaatgacgaagacacaagatacagttctgtcctcatcttgacttttgtgtgggtcagagtgagttactaattttagaagtgttctcgtgaagacatctgactactcagcacacacaatcttaaggtctttgctgtaagaagctcaaccatcctttagcctccctggccagggaccctggcctctgcttttgtgtttcaagaattcttggttctggccctgtccttgattccctaatttccacagtttgacagcaccgaatgttgtgttaagcttcttgctaccatgtaaaaatttcctgacacctcttgcaataataattgttattatataatatataattatgtaagatataataaatatataataatcgtcattgtaattctcatcactgtagtagcagcagctaactttagagcgtgcttgctatgtaccagctcctcttctaagcacttaccttttaaacccactgaattttcataaccaccacatgaagcgagtactagcaatatccccattttaacaatgaggaaactgaggcacagtgaggttgagtaacaggctgaaggtcacacagctactatgtgatagatgccaaacgtgaacctgggcagtgtggctgccaattctgggaagaagggatgctgatttgaagaatcttagcaatattttagctcccataatagtaaaaatttttagaagcgcttcctgtgattccagtcagatatggcattgttttatattcccattgtcagtgatctctaaacggcattcctgccactaaactgccactgttttcctacaagggacgtctgatcagtttctgaattgagtcccaagatacgtgccttaagctattgcatgaatatctctatgtgggaaattcttgtgttctgatagatggagaaaaatgtggtggagatagtaaaatattaccagtttcaaatgtgtttatgttaccttaaatttgaggcagactatggagagtgagaagaaaaagcagaggggcaataatctgaaataaaagagtgacagaaaggacaatttggtaaagcctttccttcccataatgaaaaaagtagtccctagttattgacaattcactcagacattactgtactttacaatagtctttacaatagtctttcaaggtttcttccaatttatgattgaggaagtggaggctcggagggaggaagtgtggccacagctgcacagtcctaggagggaaagctagaatttaaataggtttgcctgactcgaaagcttgtgctctcactgaaagttcatagtatctttctgcctctaaagagaagatggtcctgttgaacctggaaaatcagtggctaacatggggcttttcaagactcaataaggtggaggaggccagaggttcagcacgttctgccagaaacaagtcactgaagaacggaggtgtattacagaaaggcttggggggtggggggtggaaataattgtacctaaaatgaaagaaaacacaaccttttggaagagtgggaatggaaggtgatactaaaatatttagaaagctaataagtttttgttttttaagagacagggtttaactctgttgtgcaggttggagtgcagtggcacaatcatagctcgtggcagccttaactcctgtgctgaagtgatcctcccacgtcagcctcttgagtagctgggactacaggcgtaccaacaccctcagctgatatttttattttttctggtgatgaggtctcactacattgcccaggctggtcttgaactcctggcctcaagtgatcctcctgcccaggcctcgagaagctagtaagtttctaatcagtttgcacgtgcttctgagtatgctaatgcttttttttattaccactcaatggtaataaatggtgacgtggtaattccaagctgtttaggaaaatttgtactaccaaatgtcactgtcactcaagggattattgcatataggtcttattttgtttgttcttttttaaggctttctctgcctttctcccttctgttaccatggcaatattaatgttattgatctgagtggaacatgatgttattcaccagtgtgacatacattagatttgtaaagaatctatttattagaacaatttatcaggtgttaataatgctcatacattatattattttttggtcacccaatatagaagcctctattgagataaagaggcatgattttttttttcacaaaatggatgatttcttattttaaacacaaagtgtgtgtagcgagcactactttctctaggaggatctccgggaggattctggtggcatgttggtcagccttccctgaggcgacccgcaggaatggaattggcgccagcagggaacagtcactcacagtccacccaactcacagtgtgactgatcaccacgccagtcatgtcaaaactggacatttcctgttcacagaaagttgaagcaggtccattttgaagaacatctgattggacatttaaaaatggataaagatgattcagaggaccaaaagcccaattttccattttcacaagctataggtagagcagccctagctgactggaacaaagtgtgactgaagcatgtttattgtgaagaaagagatggaaatactggagatgggcattgacttaactctatttcggtaatgttgtggccacaccaataagtccccagcttccctctcccctgtgtagctttttctcctttttctgtttgttgcacccctgacggcagcgtgttcggcttgttccctttctcaggtggtggaagtctgtggcctcttagcctgtgcctcccagcacacctgaagaaaaccacaattcccagtgaggcactgacgcttgtatcttattgcttaattattatacctatttaatgctacttagaacattgtcagctgttgag[450 bp omitted]gtagcatctgaagtctttgctttaattccgcagcatggttttgaggagttaccagttccttgtaactgtatctgtggcatgactttcagagtctttaagaggcttcagaagtccattttcttcatcttcaaaaaatttgcactgatgagagatgttttctctttcttggcacagtcagacagagctgagctacatgaccattctgctgagttctgacatttatttcattggaacctttgttaccactgaggcagtctgtttcattttcatcccattccttatttctggactattggtgcgtctaaatgtaccatggtacatttttaaaactcaatactatacagagctttagcgtcaagggaggtgttttcttggatgaattcctcttctcaattctaagaagattcacctccacctggcccacagccctcacacacatatttactgcttgttcccatgtgcaaaggtcttttccgagcccaaatgggtcatgacctcttcgaggggaagggctaatacctaatatattttggtagccactgtgatcagagctcataagaggtacttggacttcaggtaagtgaaacacaacatctttggaatgagatcttatcccattggttctttactctaagatttcactttaccttaccctctctccaccacttctcaaccctgcatcagtgtagcacagagggaatgaagggggctgcaggaaaggtttggaggccaggccgaggattgagcccactactttctgcccttccccatttgccagaactcaagtcacctggctcaaccaactgcaggagctgggatgcatgatctagaagaggaggaacctgtggagtggtgagctccagtgttctcgttcctatcatccctgcctctaaaaataaccctccataaacaaatgatagcaaaagtcatctcgtgcatataaagacatgacagaaagcaatatctttttaggtaaggggctgtgtggctgtgaaggtaaggacagtaaccagtgaggtttccctcctaacactgtcatacacacatccttttcacaaatgtcatcttgctaacaactatgcaacctccttggagtgaaatcttggctgtcttgttctccactgtatcccaacgcccagtaaagaagacattgtaggtgctcagaaaatatttgctgagcaaaaatgaatgcatgaatagtagaacaaatttacattgtattttttttcacattatcttaaaactcctaccttttgtacagccagaagacaccagcacctatgtgtgcactgcatttaaacagctttagcaatatcatagtgctgttgggtccccagctgctgccagtgaaattgtttacctagaaagtccccaaggccttttctgcaccaagatatttgccttctctcatcttttggcaaaaaacaaaacaaaacaaaacaaaaaaaaaccctaggctctttggaagacaaaaaaagtatatgactgccacacatgcaaccaactctctgcttccaccaaaggtggaaatggttttgtcagtggttctctgaaagctgtttattttaaaagataaataaatctttccccttaccctgtgacatctgatccagggccaataggagctttcaaaacacagtcaagtccactgatgctgttcttaaaaatgcattctttcattcaacagctgcatgtattggacactgtgctggatgctatgggtaccagcaggattcagtcctgactctcaaggagctaacattttagtgcaggaggcagacagtcatagtgcactgtggtaagagccatgggtagggcacagaagaaggaacaggtaagcatgagaaggccaagaggagctctgtagagtggcaacacttgatggctagggagaggcagtgtatgcagaggagaataaggccctttctcttctaatatttttttggattgcacactttagaaaacaattttagacttaagacccaaaatgagaagaagcacatgacttctggctgacagccctgacatccccaatatgaggacatgattctgtgccttgctggacctcctgactgcccagccagccagggctgctcctgtgtctgtccagccccaagaccagcctgatggaaaccgcttcctgtaatgcctaatatagcacagtccactcacaatatgggtctaaaaccagacttttatcttgggagggaaaaaataatatatgtaacaaaaatgtaatccatggtaatattactcattaaattcaccatatgattaggtttttgagtttttagtaatccactgacatcttctccctgtctttgtgatgagtccagagcctgcacctttgactctgtttgcctgggtggtactccgacatcttcgatagggagggtaatgagaccgttctgccagtagggcacatggccacatagactgtttaaatcatgaaatctcttggaaatacccatccaagggatggatgtgaactctcggtgttcccgtgagagccagcaggggtaggtgccattggctagagagacggctgaaaataacccttcattcagagccttgtgtagaaagttgggttgctgtgctcatgtcctcttgacccaaaattgttaacatggttggatgaaatgctgttcctagaggggaacaaaagtggctatcacaattaacatggccctgtttgacacctgatcctaaaagtgatttttgtaaattagagtttgaagcatgtggtggcattggtggtgctttttctgaatgttgttcacttaggttttccagttacacgaattgttttcggggagcttacacacctgttcccatcctctggggtgggctagttgctatgttatgaaccttaacctttgcatatacctctgttttattcatgggaggtcacaacttggtaattctgtctagtattcaagcagattattacaagtgcttagaagactaatatagttagcatttgatttgaaagggacaaagaccagttaatagttttctgtaactatacttaatatttcatcaggcaagtaaggttgctgccacttagttaactgggatgccaaggaattgctaaaaaaaatcaaattaatacacattattacacatatttacacacattgaactatttcaaaccagtattgctggaataaagacaaaataatactgtgtatttacataacaccataacacctttcatcagaaaaatctcaagccttcgcagactaactaagctgcacaacaccgtgtgaggtgtgtaggaagtaagataggacaataaacaagaagtcgatggagggaaaaggcaggcaggcaggcaagcatgcttgcatagggtgagtgagactccttcctgctggatgacccactggcattcaagtcctggtcaccccatcgtgaggatacctagattgaaagctccagtacatgtcacaggtgattacagacttgagtattcttctgtgtgttgtttttccattctaatgtctgtattttaattgaatcgactggacaaagatacagcattccacctctactggactgtaacagtgactcccagtgtgatcaatcatttgatcattgtttcactttccctagggccaactaaatacagtttcctttatttttccttagctagaatttttttactaaagtgtgacagtttattctctagaaatgcctagagatggctgggtacatgctagtccatggaaaaggcatgggtgagtcatggtctcttttgggagggtcggggctggtgggaacaaattcctgcccaagcctgcttcagtggctgccatgcccaacacctcccatgataggcctggcctggcactgtgagcagagagagctgaccaggccttctgtggagcatctgagacaggcctggagctggaggcagtagcgagccaggagaaccagcgtgaagaacacaggaacagcaacaggccaatgggagtcgtgaatttggcttttcgaattttggaagagcatacattaacatctttaaatcaattttgaatgtactatgttctattggatattcaaaaagtttagtcctgaaacttagtactcattcagttatcccatgcaaaggatttattcacctcatcctttgagaaaaaagaattttctgtatgttagtctttcacacagcctctgtttcggcttaacctttcagattttcagataatttaggtgtcacagatacccatgataggatcgtttttcagacactataatttaaatgtctctgaaatgtaataaacagagctttgtctgggttttggaaatgatgttttcttcccaaacagctgttcatttgtattaacacttttttctgtctctaacagaaaggcagcatttcttttttatgtataatctcatcggccttttcatcatgttaactgtgtccagtgtattgttgtggtattatttttaatatcctggtgtaccacaggcagatgactagcatgacctcagggctttctgaagagaagataccgctcatttttccatagcctattctagggcagactctcactctctatcttagtggggctggctaatttcattacctattcaattcatctgagaccattttggtaaaagcgttgaaatagcaatgcgctatgagctagtctttgctcctgtattcaactggcaaagcaaaggactttggttttcattttgggggccccagttaacacccaaaggatggcaatttatgaggccctgatgaagatggtgagaactggcatttgatatatatcaatatttgatttatttgatatatgtgatcttctaacaaccttgtgatgtatataggagaagtattgttaaaattaaattttactttgaaggaattcaggcctagagaggctaaatgtcacagattcccatggctggtaggctgggcctcataccctttcctacttaatgcctctgagattcactagagagaagagtagttaacagtgcaggttctgaactcagacagtttaagttcaaatcctgtctctactatttctgtgctatgcgattttagggcaagctacttaacatgggagtaaacttcttcatctgtaaaattatgacagtcgtgctacctgtgtcacagtcttctctcaaggattgaatgagttattacacagaaatgttaagaacagtgcagggcacatagtaagtactcaacaaacattagctaggtgaattgtttaaagtgtccagcacaggaagcagcctgtaataggaaatgagcctgtattatgcctgggaggtgatgttacacaggtcctatcgagagtagacaagctgactaaggaaggtgctcaagtccagcagggaaagttcattctgcccgtactgttaccaaagttagaatatgacaatacttctgtttttgcggtacaacccgggactattgcagcctattaaattaatgagaggcagataattgacagtgtctcccactggggaaccaggtctcactctgggtggagcagttaatatgcaggtctccactctggagggataggagtgctgcttcctcatgctgcattccagaatcctttctagatgccttcaagatttatacccttaaagttggaaacctggggggcaccttgtgcccaaacagcgctaaattccaggtaacacatctccattcacaacctattgtgcgtagaccctcctggacactgctattgaccgttgactgattatgtgatcaaagattgatgaatctggaagcactggagggatagcaaaggctttcatttttttgtttgtctttttaaatcctgttccatgttccactttgaactggattgaagtcagcagtgaaatcaggagtgtggaagctgtggtaccagaggagagaaccagtgagagagacttggcttatagcaatcagtccagctccagtcagataaaggagacaccagtgagggagtgaacagaatggtagagaacaacccagctgagattccagcatccttttcttctatcatcagatacaagaggagagttcacaagagaagcccagtggctttattcggagagagttgtctggttaagcacatatgtgcaccgcaaatccacatttgagatccacccgtttacatttcttcatatcagcatctgatcaggaacctccaaatgttctagcatcctttgcaaataattttgatttggaaggcttctctggatagttcatttttactgaaagactattctcttgataagaaatttctgacaattttagttatgttaaatcagattccacatatataatgacagctttgttggtgtgtatttgtgtgtgaagcattgaaacgcatgtcacgtcctgccatcttataaagaacactgccttaatttttaactatgctgtagggagcacccagtgttcatacacatgtatgagtgtatgtcaacatacataggatgattgaaccatgaactctgtaaagtttggtagcatacacagaaatttggtaaggacaaggatttttgtgctacaaaacttccttatcaaatgcccagtagctctacgtgagttccacccaaggaccttgttgtatggacaaaagggcacaggattttccagccgttgctgcaataataggtttagaagacagacctgggattgtgttccagctttaccacttactacccctgtgaacttaggcaagatattgtagcatctcttagcctcagtttccctgtccataaaatgaggatcataatattatcaataataccttcttcaaaggtttttttttttttttgagacggagtcagctgtgtcacccaggctgaagtgcagtggcatgatcttggctcactgcaacctccgcctcccgggttcaagcaattctcttgtctcagtgtcccgagtagctgggactacagacgtccaccatcatgcctggctaatttttgtatttttagtagagatggggtttcaccatattggtcaggctggtctcgaactcctgacctcaggtgatccacccgcctcagcctcccaaagtcctgggattacaggcatgagccaccgtacctggcctgatgttaagattttaaaatgcggccaggtgcaatggctcatacctgtaaactcggtgctttgggagaccaaggtgggaggatcacttgagcccaggagtttgaggctgcagtgagctgtgatcatgccagtgcactccagcctgcatgacagaggaagaccctgtctctaaaagaattaattaataaaaataaaatggctgacaaagcatttagtacagtaactgcacatagaaagagctcaatacatattgtttattgcttttgctatttttattattgaatcacaattacctcattcattagatagaagaaatacttcctacataacagagctgggtttcagagttgactgagctaacgtatgtgaaaagtacttcgtatatgctctgaagcaccctgtgaaaataataatgattgtatgtttatttactgaggatctactaagcaccagtcactttatatactctccaattctcataacaatcttgtgagagacatagtatgattttatagagcaaatgaaaggataggcttacaaggatttgcttaggatcatgctcagatttcgacccagatctattttaaattcagatttatccttctacaaagccacatatcaatgatgataaccttgagaattgctaataatagtttcttgactttattaacggtcgaattggactcatattatctagtttaggctgatttgtcatttttttgagtagtatagcatccatggcatgctttttttgttaaaatgtatgattttgatgaaatgcacttaatacatcctcactcacaaacttgtatatgtagctacctacaaaagatatttgtaccactaagcccttggctatgaaggcagttccaaataaaagaacatgtcagcagagtcctaggcaatggcagtgtggttgaaatatacatgctgtcctcaaggtgaataatttgaagggcatacttttttgagtggataaattctgatttttattataattttcagtgctttttcagtcactcctcatgtttttacatttcagttacatgaattttcattcatattgtggattacaagtaaactgaatttacaatttgatgcccctgcctgcatactaatgataactagcttattgctcaccagctcacagtgatctgctcagattggcatattggaccctgggcatattcatgaggtaatgtatctgcctgcgagtgcatgtgtgcatctggaacctagcgtattgtaaggagataggcatggccttttcagtttggtcccttcctagctacagggctttgcgaaagtgttggtttttttttttttttttttttagtcttctaagcctcagtctcctcatctattaaactggaataataatacctatctctcagagtttcttggcaagtaaaggggtacttcagataacatgccccatactcaaaatatgtaactcccctttccacccttctttgttaccaaaaaaaaaaaagtatagcaacagtagaatatttgctttgttttttcactggatcatagttccacacacaagaaaaaccatgtctggttaacaacacaaggtctaaacagatttacaaggagatcagatgcttcgcctttcacctgactgagatgaagccaccaacgaggctgtcccatgtgtgcagtgccttctgcccagatgtggcgcaagtgctccagctgccccgacggggctggggcctcagaatccccctcactccgccttttgggtttttgctcctaaagcatcctggccgtcatcactcacatgtgctcaccaggtttcgtttctagttcagaggaaacccatacttttcacctgtgtcttttgatccctggcctgatggaatatttttctaatgcccccacttttcccaactgctctaagttacaaatggccagatttcagtcattaggagagtagaatttttttttccttttcctttttttttttttcttttttttgcagcctgtctcactgggggctggattccaaggaagcagcccgtgcactcacaggccaggggagccaggatttcaacggtgtcaacaatctttgctcatcacaccaaaaaagccctgtgtcggtgccgactcattagcatacagccgtgctgtgcttgctaacaaagcaggctctgggtatctgctagtttctcagcttgtctgtcttccttgaccgaaaagaagagaagaaatagattcaggcaagggtgctgtccccctcctgtggcaagacagcatcacaaggattcccagagagagcgagctttgaagtgattttaaagtcaccatccttgggagaaaggagactgtccaccctttgtttttctcatcttcttctatagcatcaacaagcaaaagaaaaatcgctatgttctctagttaaaaatgatcgagccctgaatacttcctggtcatctctttcatagttgttgttgttagagtgcataagaagaaatatctgtataggcagaggtacacaagcatgctctcccctcagtctgtctctcgatccctcttttgttgggggatggagggaagaagaaacgtacaagcagatgtgctgctagatctacaggcttctgccaaccatatggcatcttaaggaaagatggttggagcgtctggattagcagagtcgggatgggaagccatgtgtcgtgttggtacaggcagttgtttgagctctctctaaatggcttcaggagattgtgtaatggaacaaatggtcctgcgagcccaggaacagccttgccgctgctggagaggcaattggccctcgggcgggtactgcttcccttttttcccccagtattatgtattcttcatttaatgttcttcgaactctgagacttgactcggaacttttcaacttattacgctcgtgggttctgtctgcctctgtgtctgcctgaactctactctgtccctaatctggtaattaataatgccccagtcctcttctgtgtcctctccctcggccctccacggggggtccaggctcagcaggccagcttttcgtgcctcttgacaaaggccttttcggaggaggctgccctgctatcaggggttggggggtggagggaggatgatgtatccacccatcagaattcccagaagcctcaggagatggaaaatctttcatttcttaatgagttaactgggagttttacgtcgtcctaggtgttaagcacatgagaaatatgtagcatcactattttggacctcatgtgtggcattaaaaaaaattattctaatttcatactagtgaaagcattggactattaggtcacaggtgccatttactcagcaatttgagacctcaggattctactctctaatacataatttaaatactgtatgaatatactgtaaattggagaactgaaacactgtgaggctggcaacacatgggcagtatttcaactgtggtcaggttctcaggccattcttattttgggaggctggaggcgggagaagcagtgagacctcacaactagaacagatctggtgagtttcttctcataggaaggctctttggacatttcagctgccttttagggcaaacagatcttgttttgttgatgtttcagggtcatggcacatgcagtgcagtgtctttagctgctgatatagttaggtctgcctcctctctggggtagataacaaagcctgaggctccaggtgtgtcatacattgtgcttaatggaagataaaatggctagttgattcagtcaaagaacctgtccatttatctgactaaatcatcaaaccagtttgaattaagtcatcagcttgagtccctgagagtagctggtcagtacctggtgggcatttttgtttgtttgtctgtttctaagtccagggctggagaaagaggtcagtacctggtctgtgctgcacaccatgggggcagagtgcccttcctcctttctcacaggcaatgaccccaaaaacggaagcaagtaagaaatgcagcatccaggttaaaaatgaattcacttatggtcagctgtgtccaggctgaaaatgagtcacctatggtcaactgtgggaaataggaagctgtcatgcctactgcagcttccctcaaaggtacttcgagcaatgaaaatacattctaatttatttgctgtggaacaatgcaaaggcttcctcaaaaaaagaaatgaaacctggagaatgtgtgactgaactccagcaggagaacaggacacaagtctagaaatctcaagtgtcttcaaactgttattatttttatggatttgtgactccagcaaacaacttttactatcttaaacaaggtcatctgaaaatcacttgaagattgttaccaaattccttcataaatattttctacaaacataaatgtccaccagaaatttcagataaagtactatttctcctgtgtcaattctttgtatttaaaatttatctcatatacctaggttttaaaacacgtttttaaattttcagaactcatttcatgctgaacatgttaagtgctaggatattcttactttgtcttccgagtttaggatctctgcgggggtgtggggggtgtgtctgtagaaagcataattttgattgttatccaccaattggaagaaatccctactttaatctcttttaccttccaagtgtacatggtcccaaatttgtcagtcttagaatttcttgaaacaatgcaattaaactgcaacatatttcctaacattcttaattaagacagtgactgaaaaatgtagattaacagaagttactgtttttatcaacatattttctctctctttcccgccaccatcacatccccctccccctaccccttcttgctttaaatgtctgatgtcagtttcatccacatgtacattatgcacatggcactgaagaaacaaagtaaaaaattctcttttaattctgagctgcatgcccagcgccacatgcactgtctgttacatgtcgcttcttatgaggttcatgctgggaagtttctttttaaaggcgaagtgtttctgaaggaaagagttcaggttgggcagattgtgttagaaaaatctcactgtctccgagtggaattaatatactgattattctgtgcaggctcaaactggcagcgtgtgcaaaagttcaagagtgtctgggaattgaaatatggaggagaaagcgggagagtgagcagagacaaagaattggaagtagggctcagaagtgaaactaaacggtaactttgtaaagagaggaagggaattcaagtctgaacaactgtcatgaagcagtacttactgaaaatatttttatggaatcaggaagctccattttccatggcactttttaggaggggtcttacaaatgagtttggttattggaggagagttgccggggggggggggggcggggggccgggggagtacttctttgagttctcaagatccttgccagtttcaattaagtcacatgagaagcttaatcactaacatagaaatgtaaacgggttgcagtatttctttggcctattagccaagattttttttttcctgtttattaaaatttgagtccttcatgatcactgacaaacaatgattcattggtttacaaataaggaattaaaaggtaagaaaagcaaatgcaatcacgcagcacctttcccatcgcggggaaatcaacctttttactcattgcctctcaggggaaagaacttgggacgtgagcatggagttaatgaagctttcacccatctcctcctctcaaccgtcatcccggtttaatcctctccttctgccaaagtccagaggccctgcgagcccccgtggagtcgcctgagccagatgctccgcacccagcctccccaagccccggccggctgccctccaggtgcgggctccaggccctctcgcgcggcttcggggctcggccgagcccgggcctagtatccagagtcgaagcagccgccgggaggtctgggtgggcagggaggccgagaggacggtgcaccgcccggcagcgctgagacctggccgcctaggccaccctgcccggcgagggagaggggtgtctcctgcctggagcgctccgcggtggcccgagagcaggtgctggcgtgcgggaggcgcacgtggagccctgcggtctgttccacctgcagaggcacaattgcccagcgtggggtggaaggcaggctgggagctcccgggacgcggcgtggcagcgcagggctcggctagatgcgctcctcctcggactggttgagtaagggaggaggctcgtcctgaacgtgcacagccgctcctaactccgtcaacggaatttcactcaactccgagactgaagcattttattggcagcatttagaatcggggaaaaatctaccttctgtttagcagttgctcttttctgaagcagaaaattatctctagggatgacttagtaatagggtaccccattgccatgtgggtcagggattgggggaatgtccggatcctgccaatgcacctctgtaaaaggtggcattcagcctgggaggagaggagctggcagggcaggccgcccccagacacgcacaggcccaagctctgtcctgcagcccctcccggacacgcacaggccctgagccctgtcctacagcccctctcctgttgtcatttgctatcagggcagttctaccgccgccactaagctttgcttctcccaacacaaccaagagacggacatatagcagtgaatactgtctggatggtttagcatgtctggggcgggggtctttctattgcctgcaggggtttccgagtctacccagcaggtgctcaccaggagtgggggctgtgactgggacccatggcctgtggtgtgaggggtgaggggccactgtgtactgtaaccgggagcagcctggaagaaggcccctgctcccccttccctccggcgcctcttactcaggaaatcttaatgtgggaaggatgtgtatggggctccataagcaacactgacccagtcctggggagagacaaacccctcgtccgctctcagatcatcctcagagatcctctggggcctctgagttgaatcccaggctctcccctgctttcgcgaggacccaaggcttatgcacacagagggtttctggttggaacacctaaaagttgattgatgacagagagatggtgctaaactggcatattccaaagcaatcttggtatttgttctttgtcaccttcctcaaggctcaaggtgctttttgggctaaaatggggcattctgtgaacgtgtgctacttttgaaaaatagaggaaggggtgttggaagcctagactggttctcttgccactcctcaaaaagcaaaattttgcagcccaaatattaaaaattgactccgcgtattccttctcccccacagtggcacacaactgggcaggctccatctcgtctgctgctggaacccactagaaaccaaatgagccctccagcaggcctaatcactctgatctgtcatggaccttctagctggaagagttatgccatcatattatcccaacactcatcagtgtgtggaggacccccttttactgaatgatttattgctctttgcagaattcctttggctgcagattttatttctgagtcactctgttcagctcaattggtcgccttcagttaccgtggcaaccagcagatggggttctttgacaagggtcagcggggaggctgccttggtttggacagaagaggagctaaataaaaagctttcagcattgacggttccgtagcggacggccaggagttgttatcaaattacttgcattaaaacctaattaagatgtgtgccaataagtgggctgtagtgattgaatctggttacttagctgctgtgggcccaatcttatgccatcacacctctgtggctagtttgactatcccaagaatggtcaaatatgaaggaaattgaggaagacctcaccacagtgtggaacgtgacatactctgggaccacaccaggagggttttagtctctgggagcaccagaaagtccccattcaaacagaaacttcctgaaaacacagcagtgtgccccccaaacccaagatggcaactgaacaggacctccatgcgtctgatagttccatgtcttccgttaagactattggtaattcagttgcaaatagcattcaacaaaataaaactggcttgtaatcactctgggttaaagaagtctaaatagagacatgccaactaagtatgaaggatcttttctggagtgggaagaaaggaacattattgggccagtcaacaagattagaatccaattcagtaggttagatgaagctattagatcaatatgaaattgactgtagttggtaatatactgtggttctgtaagagaatgcctttatccttaggaaatacacactgtagcatataagataaaagggcaatggtgcatgcagcttactgtcaactggttctgtacacacacacacacacacacgcacacacacacacacacagagaaaggcaggagagcgtaatcaatcagatggggcaaaattattacagtaggtgaatttgaataaagggtatgttggtattctctgtaatattcttgcaactttttataagtttgacattatttccaaataaacccatttttaaggacggctttagggtgaggtagggtacagtgtgcgtggcagtgtgggttttcctgctggtgcttctgtatggccttgagccacatgcagcatagatactactctgcaaagattctgattttcaacaatttccattcctctgtcccatttcctttgcacagtggggctatcctcaccattagtctgttcttgcttgagacaaagctgattaaggtaactcttacttcaggcagatggtcttctaggttcttcaaagtctaagattcataacgtgtcaactcctgtttcatggtgtcaggatcctttattcatgcccagtcttccaaaggtattacaaactcagccttggttcgatagcacttgtattttaagaaggttacaaggtagtgattcaacaggtctaattgccctaagatgaagctgtgcctcctttttggtagaagcactgtttgaagaagttggtctttgaagagcctcggtgatattgtcagaggctttaggttcctgtcagaggcagctgtgctggagcttgaagagctgaaagtgtccccttggccatgggcccattcactgggggccagtgtggcactgtgggcttcccaacatggtcttccaagcttctggcctcttttgcatcctttgtgccaacaccagtctgtggatgagatcaatgtggctcagagtgtggtttccagagtacggtcctcaaactgttactggtctgggatgaggcaagaactgaaattgagtcagaaattttcaaaacaatcaaacactgcttcctcctttttattgtactccacaaaaccattagtctacaatagattggaaattttaaaagaattaaaatcaagtctggttctcctcactgagctcattggggaatccctggcctagggatttccctcttctcccgcccccaggcctcggaaaatgaactggtgtcagctgctgcccagaaggttacccagcgtgttctctctctcagggtccttcccttaaattctcaagtttgacatggaatagaagaatgtcgggcgtttcaaaaaaggattttgagatgctgcaaagctcactggatttagagtcaagagatgtgggctctagcgccagatttactacagacaggctgcctgaccttgggcaagtcacttatactttcttggcttcaccataatgggctgaactgaatgttctctaaggtgcctctcagccctaacataatatgattcttttcatgagaagagcaggacttgatccccccatcacttgggggcatccccaaggagccccctgttcttcctctgcaggcagccaaggctaattaggaatctgagagaatgagccaggaaaggggcagtacaggacatacattctcttcattgaaggtggtaccccctccccactgcacgatcctcaggaagaattcctttattgaaaccattattgaatagggtagatttaggcacgggaaatgtaaacagcaaaccagccactaaaagtgcgttaatgtcacgcctgtaatcccagcactttgggaagctgaggtgggcggatcatgagatcaagagatcgagaccatcctggccaacgtggttaaaccccaactccactgaaaataaaaaaaattagctgagcgtggtggtgtgtgcctgtagtcccagctactcgggaggctgaggcaggagaatcatttgaacccgggaggcggaggttgcagtgggccgaggttgtgccactgcactccagcctggccacagagtgagactctgtctcaaaaaaaaaaaaaaaaaaagaaagtgccttaatgttctgagcaaggataatgggctagagcgtgttccggaagcctcagcacactgcttgttctcactgataggacctcgttcacgagatggaattatgtaaaatgccgcagcaatggttaagtgttggaacaaagtaatacagctttacattaacatggtttattcactagaattaatgacctagagcagtaattgcattttcaaaacttcagcttgctgactaggtgtattgctatgtaaatagctagcgatatttgaagataggaacacagtaaaatctgtaaagtaataggattgtagaaatatggagctggaggagaatgtagtcatcttctagccccgaggctggcaaactttaaaaggtcaggtaataaatattgtaggctccatggccatatgttctctgtcgcagctactcggccgttatggtgcaaaagcagccatagacaaaacgtgaatgaatgggcatggctgggtttcaatgaaagtttatttaggggcgctgcaagttgaatttcatgcagtgttcacatattatactccttttgatttttaaaaatcattttaaaatgtaaaaatcactctcaattggcagatcatacagaaacaggcagtggcctgtagtctgaagtttgccgacctcacttctagttttctcctctcatttcacatgtgaggaaactgagattcaaagtgatcacaggatttacttaagttctcatgactgacgccagagtattttaggagcagactaggagagttttcatgtagacagttggttgttttgatgatgaaaattgaagccacacaaaaattattctccagaagaactcatttcgtatgtgtgattaatactgtgaattagaatgtaccagtggttctcatgcttaagaattcatcagagtcatccaggggccttattaaaacacatgctgctgggccccaccctcagagttgatggttcaggtctggagatcttattttctccattttacaaatggagaacctgaggttgagagagatactcagtctcaggcttaaggtaaaatagctagcttgtgatgtcccccatttccaagttcagcactcataggattaggattagagctataagtaatcatcaagcagagaggcagggctgcagttttgtttagagagatccttctagtctagctgttgcggggagtatggattccagggggccgtgtggaagcacacaactctatgagaaggctgtgcaggaacctggatgtgaagtgctggcagctggacttcaagagtgaaggtcatggaatggatgggtggatggatgagtgggatggatgggtggctgggttggttggctggctgggtggtttggctccgtgggtggtcggccccggccccccgtctctttgccccctccggtggtcccttcgttgcggccttccgcgcgcgtcggtttccccggccgctgccctggcgggggcctgtgtcgcgggtgccgttgcggggttccttttgcttgttggtcgtgggcgcgtttcctcctcttctttctcccggccnnnnnnnnnnnnnnnnnnnnnnnnnnnnnnnnnnnnnnnnnnnnnnnnnnnnnnnnnnnnnnnnnnnnnnnnnnnnnnnnnnnnnnnnnnnnnnnnnnnnnnnnnnnnnnnnnnnnnnnnnnnnnnnnnnnnnnnnnnnnnnnnnnnnnnnnnnnnnnnnnnnnnnnnnnnnnnnnnnnnnnnnnnnnnnnnnnnnnnnnnnnnnnnnnnnnnnnnnnnnnnnnnnnnnnnnnnnnnnnnnnnnnnnnnnnnnnnnnnnnnnnnnnnnnnnnnnnnnnnnnnnnnnnnnnnnnnnnnnnnnnnnnnnnnnnnnnnnnnnnnnnnnnnnnnnnnnnnnnnnnnnnnnnnnnnnnnnnnnnnnnnnnnnnnnnnnnnnnnnnnnnnnnnnnnnnnnnnnnnnnnnnnnnnnnnnnnnnnnnnnnnnnnnnnnnnnnnnnnnnnnnnnnnnnnnnnnnnnnnnnnnnnnnnnnnnnnnnnnnnnnnnnnnnnnnnnnnnnnnnnnnnnnnnnnnnnnnnnnnnnnnnnnnnnnnnnnnnnnnnnnnnnnnnnnnnnnnnnnnnnnnnnnnnnnnnnnnnnnnnnnnnnnnnnnnnnnnnnnnnnnnnnnnnnnnnnnnnnnnnnnnnnnnnnnnnnnnnnnnnnnnnnnnnnnnnnnnnnnnnnnnnnnnnnnnnnnnnnnnnnnnnnnnnnnnnnnnnnnnnnnnnnnnnnnnnnnnnnnnnnnnnnnnnnnnnnnnnnnnnnnnnnnnnnnnnnnnnnnnnnnnnnnnnnnnnnnnnnnnnnnnnnnnnnnnnnnnnnnnnnnnnnnnnnnnnnnnnnnnnnnnnnnnnnnnnnnnnnnnnnnnnnnnnnnnnnnnnnnnnnnnnnnnnnnnnnnnnnnnnnnnnnnnnnnnnnnnnnnnnnnnnnnnnnnnnnnnnnnnnnnnnnnnnnnnnnnnnnnnnnnnnnnnnnnnnnnnnnnnnnnnnnnnnnnnnnnnnnnnnnnnnnnnnnnnnnnnnnnnnnnnnnnnnnnnnnnnnnnnnnnnnnnnnnnnnnnnnnnnnnnnnnnnnnnnnnnnnnnnnnnnnnnnnnnnnnnnnnnnnnnnnnnnnnnnnnnnnnnnnnnnnnnnnnnnnnnnnnnnnnnnnnnnnnnnnnnnnnnnnnnnnnnnnnnnnnnnnnnnnnnnnnnnnnnnnnnnnnnnnnnnnnnnnnnnnnnnnnnnnnnnnnnnnnnnnnnnnnnnnnnnnnnnnnnnnnnnnnnnnnnnnnnnnnnnnnnnnnnnnnnnnnnnnnnnnnnnnnnnnnnnnnnnnnnnnnnnnnnnnnnnnnnnnnnnnnnnnnnnnnnnnnnnnnnnnnnnnnnnnnnnnnnnnnnnnnnnnnnnnnnnnnnnnnnnnnnnnnnnnnnnnnncccaggttcagaaggcctagagggctcatctgtggaaccaggagactgagctgtggggatggtgactaggggtggtcccacccactgagagggtcacagagagaggagcattagaaggtgactccagtgtgtcaggtggtgagtttgaggtgggcttggaaatgcaagagagaggcccgaggctgagatcaagtgctcaggatccttggcctctccacttggagtcatgagtgtagattttaaaaatcatgcaggcggaacatttccagtcaggagagcactgagcccagccctgggtcacaccagcatttgaaggtctgatggaggaggaagagggaccaaaggggagtgagagacctgtacagagtctaagaaggagagtgatgagtcgcactgtgggccttgctctgtggccttggtggcttaggtaatcctggctctgccttaccttgtgtgcgcttgggcaaatgatcgcttctctgcaccttgcttctctcatgcataaaatgcagatgataaagtaacgtgtagtattgttatgaggattaaattagggaatgtaaaatgcttacaatgttgggcatttagtaaatgctcagtaaacattagaggaggccactgggaggagtagaaaagtgagtgcatattttacagttcatgtatttgcacctttgaaatccatatgttgtttgaaaaatgttcttcatttccatgaggaagacgccgctcccagggaaatagtgagtctaagcactttgagaacacttatctaagaggaaggacaatcttagctgtagtcagagtgaccacagggaggaggctctggtctgaaaacatttcagaacaaaggattttaccactaccaccaaaaccaaacccaaaacaaaaccccaaaacaacaactaaaaccttccactgtagtccgtaggtagctcccagggggaattgtccagtgaagcaaaaaactctcattgaaaaacatacaggcataaggatataggccccctctggggaaggaaggggctggcctggagaagaaatccattggtagtggccctgtggagctggtgctaggttcacaagtgttcatttggttattatacctcatgacttatgtatacattgcatatattttgtatgtatcacatacaacataaaaaaatttaaatctatgtattcacttgctttcacagtattcatagcaaatgagtgtctgaagcataggaccagagctggcagcttgcaccgcttctgttttgcataagatattttccccagcccactcagctctataaagttgttttgtatttcaccacttgctccatcttatcttgaagccttgcatatttttttaaatgctggttctgatcatgcttgcagggtgtggctcagaggatcgctgttggaccaatggagatctgcctgggcccagcactcttatgagtcccctgtgatttcatcagcatctgcctttagaaacccgggcgtgtttgttcccatggtaactgctgcccctgacacgcctgaaattcctgggatgcccttgcgtggaaggggagcccgtgctgcccattctacccctgcatggggcagctgcttttctccctcagggtccccagtcctacccaggcaggggtggcagttgttcatctgcagatcctgaaggacatggaccctgtgcctgagattaggacggccgcaccagcctgggtgcaggctccctcaagtgtccttcctcatggacccgcggaccctacgctgtgctgtgagggccggggagcacaggggcttcctgggaggaggactggcttcctgcccctgatggggcctggccacagctcccagggctccatgacagcacagtgaagatagcaaccacatcctgggggccctggatgcaatccctgcctgttgcaaagatgagataaaggcgcgggaaagaagggtctgaattaggggttgagctctgaaatcggacgattctgtgtttcctgccgcatggagggcgtgtgtggttcgcaggctgtggggggcttcttgcagcgggggctgctgcctaaacagactccgcgggccccatgatggcaaaccccctcgccccgttcatgacttaatgcctcctagaagaaaaggctaaaaacaagacacacagaacaagaaattgcactctctcaaaacgacagtcgccctgaaacggacgctggaagaggtttccaggcccgtggcgacggtgaggggggtgaaggtcgcaggtggagggcacggggcggcggctgcggagcccggggaggaggcggcgggcgcccgggtcttcctcggagcgcgccccctgggctgggcggcgtgtccctgcctcccgccggcgccctcgtccccgcagcagcgtccccgccgccaccccgctgcctcgtcgcctttctcgcaaacagcggtgccctctacgtgggggatcctggaggctgctgagcacgagcgccctccgcgacccgcccctgctcccgcctccactcttgcctcggggggagggtctcagtcttctgcctaaggcgccctcctcccttgggaagtccgccgtcctctgccgtgaagattgcccctctctcctccagtgcctcctccccagcggcttcggtggctcccaccctccgcaccccgtctcgcgacctccccgccagcccagcccctcaccagaagaggctttctcttccagcccctgaaatctggcttctgccccagccaggaggctccgcagggcgctccgccaccaggtggcatttcccacaaaccggccactccgccctgacccctctcctccctggacctccgtctcccagttttcctccctccaggatcccactctcagtgtcttgccggattccagtccactgccagccattgaaggcggaggttccttaacccctatcctggggcgagcccttccctctcactgcagaagagcttctcagctaggggggtcgtgcgggcccggagagctgcatttttaacaaactccccacactgacaatctttgccaacccttcccaggcaaatcttgcccccacgttcatggtctcgcctcccagcaggtttggcccacccagctagagctccagctcggcccttcctaagccccaagctgcatagctgcctggtgggtgcgtgttccacaggtacctcggactcgccctgaccccagaacgtctcttctacgccaggccgatccctcctgccatcctctgtctgttaaatggcactgccattgcctgcaggacgaagtccatatttgctggtttggctacagagtccagcgtcgccttcctctgagcagcctgcagcctctggtgcagccacactgcacagcttgcagtttccagacacgcattggcctttgcagtgcggccccgaagtgggaaggccccgcccctggccctggccagaaaagcacccactcatcctttcccatcccagcttgcccgctgagtgactttgaatcaatgattcatgttgtctgtgcctcagtttccttaaccttaaagtggcataataattagttcctgcctcatggaattgtgagtgctaaataaacagtaagtctagtgcccgacataaaagtgctcagcatacgacgatcatgagccatgtctaagcaggcgcaagccctcccaggcttctcatctgcaatattggccatttctcttcatgcctcagtgtcctgtttgagttgagcatgttttttttacaagtgagtctctcctccattggccgggaaccgcccgagagccgggagcatttgtcattcttgatggacccccaggtcttaaatcagtacttgacccttaagaggtgttggccgggcgcggtggctcacgcctgtaatcccagcactttgggaggccaaggcgggcagctcacgaggtcaggagttagagaccagcctggccaacatcgtgaaaccccatctctactaaaaatacaaaaattagacaggtgtggtggtgcgcgcctatagtcccagctacctgggaggctgaggcaggagaatttcttgaacccaggaggcagaggttgcagtgagccaagattatgccactgcactccagcctgggcaacagagcaagactccatctcaaaaaaaaaaaaagaagaagaagcagaagaagagaggtgtttagcaaggcttggttcgtttggtgaattaactcagtgagttaaccaccattaacgatggttaaggacacttgggcgctggctcgatttgactccgagctttaccgattacttgtgtgactttgtgcaagttaattaacatctcagcttgttttctcatctgtgaaatggggatgatactagcatgtacctcctaggactatagtgaacttttaattaagataattattgaatttaacaggtagtttattaatgaaatttacataggtaattgtggcgcagtgagcccaggggctcaaggtgttagcagtcatcaacagtgctatttgaaactgtgggtggatgaagaggtgaactcaacaccacaaatatgacagagcagtaaccaccatggaaaagaaaagagagcttatgtgtctaggacaccccaagaaatctcttctgaatgaatgatggcaatgaaatagccattaacagagggtaggctggtttgtgcagggttggaggcttttccaaaaataaataactttcaaaaaatctcagccaggcgcggtggctcatgcctgtaatcccagcactttgggaggctgaggtgggtgaatcatgaggtcaggagttcaagacaagcctggccaagatggtgaaaccctgtctctacgaaaaatataaaaattagctgggcacggtggcaggagcctataatcccagctacggcaggagaatcgcttgaacccaggaggcggaggttgcagtgagctgacatagcaccgctgcaccctagcctgggcaacaaagcaagacttcgtatcaagaaaaaaaaaaaaatcaatctcgggccgggcgtggtggctcacgcctgtaatcccagcactttgggaggctgaggcgagtggatcacttgaggtcaggagtttgagaccagcctgaccaacatggagaaaccccgtctctactaaaaatacaaaattagccgccgttgtggcacatgcctgtaattccagctactctactcgggaggctgagacaggagaattgtttgaacccggaggcggaggttgcggtgagccgagatcgcaccattgtactccagcctgggcaacaagagcaaaactctgcctccaaaaaaaaaaaaaaaaaaaaaaaaaaaatctcttttcccaatatttgtaatactgggagtgttcaagttgatttaaaaattgagtcaattggaatccatcctcagctcttagctgtgaagggagagctgccccttcttagggatctcacttctcacagcaggggtgcttctgtgtgtggacatcctggtcagctggtcccctgctgtcttgtggggctcacacccaggcacttgattcagcggggtctgggtggtgtctccttcctccttcccaccccagtaatcgctatagccttcccaggcccccaggttgcaaagcactctggactaaacctcctccaggttctgagggctccataggaggaaggtctaggccagaaccggccccatcgctgaaggtggagccagggtggccggccgtgaccggtgtttatgctgtgagagcggctttggccctgcccattgccctggatgggctgccatcccttttcaggagttcaaaaccacatactgagcccatcggtccaaaggaccatcatctcatttgatccaagcacagggcaagggaccacatggacaatggctgctcgtggcaccttcttgccatgcagccatgtcatggtgtcacttgtcacgtttcctggcaccttcttgccatgcagcaatgtcatgatgtcatttgtcacgtttctgttccattcttttcgagcaagcaggaagccacggggctacctcagttgctcttagccagtagctctctccacaggtaggccttcatcggaggggaaaagccaccttagggttccagagctcaagggcgaatgatgctttccacccactaatttaaatacggaagcatcagattgtctgcttctcaaggaaaagagctgttaccatctctgtctcttcaatgggacccactcctgggccccacagcagggcaggtgctcagatgaatggtggccgcctgcctgtgtcagagggtcggcctaggcaggttccccagtccgctggcccgggacgtcctcctctctcccggccgctcactgttcaggacagcccgggcccccccctggggccttgcaggagagcttctgtgatccactgggtggctttgagggtagctcccaggaaaggctgcctcagccccagcgtgatggggacgggtaggggccgatgaggcttcccagagcagcgatggccttaggtattgccagaaggaaacctacttttcctccaagatcagagggaaggatgaggtggggtgttggagcatcaccatatatatacatcacacacacagggaaacactcctacttggatggaggatctttgctgttctgttgaggccagcctgatcctggaggcagggcagggcctggctgttgcccaggctccaaagaggcgccagggcgtcccttagtccttacactttctccagaacctgcgggcagcaggaggcccttgtcgggacaggcaaggggggcggtggtgcggaattgtgggcgtggcagtcggaggtgccaagcccggggaggcggggcttcctgggagcatgcgtagtgccggctctgcctgggcggggtcctaggctgctgctcccgcctcccccggcacaggtagggcgccccgcagacccggacaacgctgggtgtggctgaaaacagggagtcatggtgcgttctggggaagggtcagggctgggggctcgggcccctggaccaaagactctagccaaatccatcggaggctgagcagggcgatggggcagggccgggggagccgtggggaaatgggagggtgtgggccgagcagcgccggaggcaggtaccgaccatcgccgggtttcccagagggcagtggtacctgtgcccacatgtgcggccttttttgtaaaggaacctatcccaacccgaaggcccaaacgtgtggccgtgtaagtttagttgtgcccggagtcccaggagagcccggactgagggcagccagaggccggtgtccgcagaacggcccacgaggccttcggctcagtagcctggagtttgaaatgcaccttgagctttaatggccttttccttgtgagaattcgagttaacgtgcctgctggtgcttttgatgggtgaggacggtgaggcaggccacacatctcgcttctttccagaacacttctgggtagtcgttcaattccacatttaatccaaagccaacagttccatgggtgactgtgctgctggctgtaggaagccgactgtggacagatgaggataatggtctgagtgaattagcaagtctggagaggagcgcccatcagcagaatgacaaatttaggatctttaaagacatctggtcagcgatgccggagctcgtgattgactgagtgattaataatggaaaacccttacttcagtgtttccacggccctcacccacttccccagccggggcggccgtctgctcagcctgccagagacctttccagctgaacaatggcggcatttaggcccctcatctttgacctctgcttgggagttcaaagcttccttttccttctacttaccccacttatctgcgtgttttctaattgatagtgtactgagatggctcccagttcccacgcacatttgctagaatgttaccttcacacagtgcgtaccaaggacctagtgccagccagagcctggcacctcagggtcaccctaggcgtcctgctcatggttccctatcaggggcttccctcagatacacacagcccctgggcctgttgaaaggctgacgttatccctctttaattctgcggtggatttttctccaggctaaggcagctggataagcacagccaggccacagcccagcagctggtgcagctcctcagcaagcagaaccagcttctcctggagaggcagagcctgtcggaagaggtggaccggctgcggacccaggtactgtgcagaacgcggcgcaggtgggagtccttgggcgggcgtctacaggtggatcttttatgcacctcaacaggccggctttctcacggatcacatcggttagcagtaagctgggagggaggtcccgaagactgtgctgggcacagtgcaggacccagagaagcggagccatgggcccgtcctggtgagggagttaaagtccgtgcaggtgaacagaccccggcccgcgaatcaacgaaccacaccgagtgccaagttgcgccgtgcaggctgcggagggtgcgagagcagggagaagcgggaggacggccgtgggcggcagaacaggctttttggaggatggtggccttgagctgcctctgaaggtcgtgtatggtttgaattggttgaggaaagaggtgttcccaattagcaaagtcgtcttgaatggaaggcaggcatctcatcctaaattagctgactgattactgggctaatatctggagtgcttgcagagcacccggcagtgttacacacagaacatgcattaattccctttacccttgaacaagcaggcgatgctgactttattgtcttcatggtttagatagggaaactaaggcccagacaagcattacagctggcaagtagggacaccgcaaacggaggctaagcctgactccacagcccaggctttccccattcaggttagatccggggccaccagcagggaaaagggaggaaggaaagtgtcccggtgaatttggaacacagtatgaaacctcgtttgctaaatcgcttctcttcctgtcagagaggctgtgcattttgccccgtcaagcagtttgttaggataatgaggtggtccgtgggctgaccaaggcctccgcctttaattaggattgcacccaggtgctctgtgagtgccctggggacttcaggcagtaagtgcttggaatgattaatatgaaaaatgcatctggaaatgaaaacgaagaggagtctcattctcctcacaaaatgaccctgtgctcaaggaacctgtaagtactgacttttcccactcggtccaaaatccctctgccaaacatgtgttcacagacagtaaatgagcacacccaggcgccacggagctaaggcctggaggtggaaatgcctctactgtccccatgcttctgagactgctcccagggactgtgggggagcgggccgctcaaagtccgagccacagccgcactgccacagctaatctaggaggcgaggcctcacctggcacgctccatggcagggccctggaacctgaattttgccaagctgttgggatgattctggacgacactacattttgaaaacctctgaagtgtttggagctggaaagaacagagaattattccaggttgtgtcactgtgctgaatcccctgcccccgcttcggacaagtaacttaagcctttttccagcctcagtttctcctctgcacagtgggcatggtgcacgcctggcttcacgggctactgggagtgctgagtgcaggcgggatgccccacgggcccttgggcacacaggctgaggacgtgtgagggtgtttcctttctccctcatcttcagagggtcctgggagaggttcagggaaggcagaggcctgcagagcagcagctgtgggaccagtgccactcccctcccctctgctttcaggatgaccccctcatcctccaccagacccagcccagaacccagccctgtgggcaggtccccagggagggccccagcagcacctgctttaggcctggccagccaaagatcaggaccactggagccactaggtctcctggcaggtgactaggctcttgtcacataggagggagggaccgtgactcctggcatgagtgaatcttcagcctctaaagccaagaactctgtcagacctcaggttgtggggagtcttccgtggaagctggagcacacggcagcttcctttgggctctggactagatcaggagaacgtgggctttgccttttaactccccatctgcctgctttacagcacacttagatcttaacatggatcaccgatgcttagaagcttcttccagggctttaaaaatctggctattgccaaatgagttgcaaaattttcacaaaacgcattaaaaaaaccccaaacctcaaaaaatcctcagaaaaactagcaggtctttctttcttcttttgcctgaagcaacagcaatgatttgcccattcctgtgctatctgatactggcccatctggctcatctctaaagcggcctttcagattcaaatattacacttggagttattttaatatgaacatgacaaaagaaatttggtagagggaatgttggctttcagttgcaaatactagtggtcagagaggaggcagggatccaggtttgcaagctctctgctgaatatctaaacccagagcctgctttttctggctaagcctggccttcacctctaggtaggggctgtcagtgggcttcagcctctgcgatgccttcttgtcatggaatcagcttgagttgtgagttaggcttctgctgagccatgatgtgggcgaggctgctgtaggttcgagcaggtattttggatgcggtgccgcctgagggctccggagtgctcagccaccctctctgttttcctggagtggcctgtgggtccagatcttgggcagctgagggttagagctgtcctcatgtccgggttagagatggtttaactaaaggcttccgttttctcagcctggatgagttaagcttaacttaattttgcatgtcaaactctaaacatctctgtccacttaatacccagaagagaatgggtcgggcaatggttccaaagcaaagtccacccctttccttccctccctgtcctgggtcctgagccccgctgcccctggtggtggggctcaggctggcctgtggcctccaacaggaagtgtctagcctgttggcaggcttcattattctaattgtttctgcttgaattctgaaacactcacaacaacatggctggcagagggagcccctggtagtggtagctgccacatggatgcttttggccacgagaacccccatcctccccgctccccggcgctgtctgcggtgggcaggactcagggcactggctcaagctctcggctcgtttcttggctttttttttttttttttttttttttgagacggagtcttgctccgtcacccggactggagtacagtggtgcaatctctgctcactgcaacctccgcctcccggcttcaagtgattctcctgcctcaggctcccaagtagctgggattacaggcacccaccaccacacctagctaatttttttgtatttttaatagaaacggggtttcgccatgttggccaggctggtcttgaactcctgacctcaaatgatccgcccaccttagcctcctaaagtgctgggattacaggcgtgagccactgcgcccagctgtttttttttttttttttttttttgatgagttttgttcttgtcgcccaggctggagtacaatggcatggtcttggcctactgcaacctctgcctcctgggttcaagcaattctcctgcctcagcctcccaagtagctgggattacaggtgcctgccaccacgcctggctaattttgtatttttagtagagactgggtttctccacgtaggccaggctggtctcgaactcctgacctcaggtgatctgcccaccttggcctcccaaagtgctggcattacaggcatgagctttgcccggcctcttggcttgttcttagtttagggtgactacaaataatggcattattgatctcctgcctcacctgggttcggaaacaacttcaagaaaatagcttttaaatgtcatgaaatggctcttacttgtccttgtggagaaacagacactgaagcactagcccagctttgcctagatgcagttccccacactctgtattccgggagggtcagggcctccagacacacaccctggcctgtcttttgtttgagactgggctgggtagtcgcactctcgccctcttgagaggcaggccctggctgggggaggctgaaaccttggtggtgggggtggggggagggggattcggggtgagggtggtgggtctcaggggagtttgggcagggcctgacagcttggagcagggtcaggggtctgcggcccagagcctgggggctctaacatctggctaggaaggttggagccagctggtgaggaaacatgagtcttggggagaatggcatctgggacaggggaaaacagaaattatctgtccacttagaggatggtctcaaccatcaagatgattttctgtgtctgctttcttatttggtaatgaatacggttttggctgacttgcattttctggtagccgtcgtatcctgagcaggctgcttggttctgtctgcagtgttcaatctggggagtgattcccttttagtcccctcatatgaatcacttacagtttagaaaacagagtcggaaactgacttgtcagtggttaatcagttggccctatgacttttaagcattcttggcagtgaatttactttctaatttgatttaaacttgtgcatggatccagcagccatatgtgattatattcaagatcatcgacattatctcattataccaaaggactcatagaagagagccgaaaacaagcaggggacacagagacacagaagatgatgaagggaggaaaggcccattgcaactggaagcaaagggagaagggaggttctagaaaagtgacagctctcagggagcaagactccctgccgagggaggcctggctgcaaggcggagctgctgcaggctgcccatgttaggccttggaggtgtcacctaatttactgtggtccttccaggagccctgggggcctcgcccagctgacttaggagctaccacaaagttagctacctgtaagacagatggtgcttgaatagaacagcaaatacattgaataaaataaattaaaaagcctcctcctgaaccaagattttttggaaagaattctaaatagatgaaaacaaacaatttgatttcaaccaaattgttgtttttttgtttttatcctgattttcacccgaattgtcagtctcaaaaataaacactgatacattcccagaaaatatttttcaaataaaaactgactctgttaaagtttgccctgattctttcaaaactgtgtacaagacactgtcaaccaaagtgacttgcatatttttttaaataaacttgaacatatgcagctaaaatgtcattaactccctgctgcctgagtgtttttaaaaaatgacacaagaccctgggtgctgcatgtctaacataagcatctcgcgaccttcggagaaacttccccaaacacctccaacagcagacagttaaactttttgttttttgactgagcgccccgtgtataattaatattgaaaagcgcatagggcttcattttagccagacttgctcttccgttaacagttcactttgtccaagagtgagtactttcagaataagaatcatgggagaaaagtcaattgaattttatattccttcagatacattcgctctacttattgcttcctgagtcagacattacatttcacaatataaattcacaatcaagattttaaagggagctaaatattttaatccaattagacaagtgaacaaaacactgaatattgcatgtagtgtagataagtggttcttgcctttaaaagactgtaattccgtcacattacaaccccaaatgtcagtgttgtctttatttttaacactttcaaacatgaggcagccagaggctccactctctgctgttggtgacactgtctgtcctttgggaattcttaaaatctatttaccatggaaacatggttcatataaaacacagacctgcctgtgtgtagaggaagttctcatgactcaggggacttgagaaagctggaagatgacaaactcagaccccacggttgggaaggaacccttgggcttgggtgcgccctggggaggacaggtggcaccgcagagccagggcctccaccccggcctcatgtgtgctggggcctccctggcctgtgcggggccgcctccctctccccgccaagtccagctcgagatgctgtcttacggaacgtcccacttcatgtctgcaaggcggccttctctgtggatacctttccattcctctggtttctgcggccctgttcctttctcggagcccagaagcagcaaagccaagccctgcggtggaagggaaggagggctttgaactctgactgcggtgtggaggctgttatcaggggcccagccgggcagccaggagggaagaatggccgctgccctgcgatggccttaaccgtgagcccccgcctgctttgcagctggcagagccaggttcctggaaaggcctgacccggaggggacgaggcccctcagtgagaacttcagtcgctgtgctggggacagcagggccgcaggggcctgagggtggctgactgcccctcggctctgtagaggagtgctcccttctgacaggtgggcggtcctgctcgaaggccgcgtttccccgacgttctgcccagcatgctgagggcacctctctcctcagtgcgttggtggcgagccagagctcacgtggcttatttcatccaggttgccttcccaatttggcagcttaattccgtagatatcaaactggctgcccctcatctgccagagcaagcaggagagcctcgcatgggagagtctggactttgaggtcaaactgcctggattcgaatctcagctctgcgttgcttcagagacatgtgttagctttcatgtcacttgatttctggcagagaaaaagaaagaaccagcttccctttaaaaggaagtgcctcatattacccagagcccagcacagatgattatgaaaccaacaggattagtgctgagatcattgtgggcttgaaagggccatttgagataaataaccattttgtacagatagaaaaataaggcccagagaaatgaagtgaatggaattgggaagtggctgggcagggaaatgaacttcttctcaggccacaggatgtgtggatgggggcaggtacccgagcgggtgcgggcggagccgggcctggctggaacagctgccgagccctggccccggtgcccagaacacgaggcggaggcgggaggcgagccaccaagcgaggcaggggctgccctggagctctgtcaactcagggccagctttgaaatgccccagatggaggtagggggaggggcctgccctctccagttacaaatggatgctttattgccagacacacaaggaacaggaccacgttttgacttggccaaacagagacagcgtgccagtgagcagagcggacagcagggggggaaggggttgttaccttcagaagggttggctagagccacccacggagacagtgaagtgcgaagcccgggcaggtctcctgtgagcaggggcgaggggtgccaccatctccccgggctgccacttctggctggtttgggaacaaagcagcagcaaaggctggctggaccccacagtgtggttgcctggggaacagttcaggtcacccagagcaactgatttcttacactcagaacttaacaaactttagaaataaatgaggcagggtttgtggagagatgactccgataggatttaaaatgagaacaaagaaaatgggttagcagctgtgtgcctgcagatgggggcacgtttccaccacctgtggacagcacggcaggggagcagtggccagggcgccctgtcgcccccctctgagctgcaggacagccacaggagggccacagcaagggccatgatgacaaatggaagggcagaaggacgggagacactggctgagggctcatgtcccactggcatacgcacgctctactctcctggacgagaccatgatcactgtggtgttgatgacaggacttcctggaaataagcatcgtggatatccctaatggcagacaagccagatgtgggcagtaactaaggcttctgtctcggtcagagaaatgtgtgttaccaaagagtcagcaaatggaggcgacaaaacggtgacctcctaggacaaattatccagccctccagtgctgactgaacgctcaccatgggtcaggcacggctgtaggcacgggtgggggggggggcgttgagcagtgaacggtaagttcaacagtgtgaaagtggggatggatatggggcttctcacctgaaccgcaggaaatacaaagcccatagagatggccatggctgatctgccgcaggaaggaatcaggctgacttttgattggttcctggtgaggcccgtacatctgtgtcacccccatgcaggcccacggaatcaggaggtcacccgtttctggaacagctccgatagtgataaattgctaggtggcctgggagcccacaggcattatgtagactcatcatgagaaatgcctgtttcctggagcttatcaaaaaattccgcaacacattttacttttacttcaggtctttacgcctattctgtattgtgtgtacgtgggtgtgttctctacccaaaattcatcactgcagccttgaattctgggctacagcaattctcctacatcagccttttgagtcgctgggactacaggggtgcgccaccacacatggctaatttttacaattttttttgtagagatgaggtctcactatgttgcccaggctggtctcgaactcctggactcaagcgatcctattgccccagcctcccaaagcactgggattacaggtgtgagccactgttgggttgtttttcttttgaagtgttatctgttgggatttatgcttatcccttttgtattcagtcatcctagcatttctaaagttaggaagccactgtgtcaagagcgaggccaccaggccacctgccttatgtggccaatccatggagcaggggtggagggccattcaaaccagtcatttagcaggactgtgctgggtcagttcgatcacctggcctggagggcacgtcagcttggtgcaaaccctgcgtttgacaatcagatcgtgttggtggcagtctccgtgctgtcagtatcccactgaggacagaagggagtcccctctgcaatggcagggctctagggcatagtgcatggggtggactcctcatgggccactcagacagggcctggagaacaaagcatcccgtgggcccaggaaattgtccacctggctccacgggcctgggagggctgtgtgcatgggatggcaggtttacgaggaggagtgaggcctcctgccggagccccacctgcattcagcctgaggccaggccccccacctactctaactaccctgctgagaccaccccactactcacagacctgttcaagaaaaagttgtcctcagggtctctcacacactgggaaatctacttgaaatgtaaacattactttttctcatttttcataaaaggcaacaggctgatgttcatatatttctcttgaatgcggattcagtttcactcattgccctgtcttggaaatccccatgttaatgatggcttaaattaggttgatagagtcctcccttggagtccagcttggaaaatcctcactggagaggggcaggcccacttctctttttggaagatggttcctaactaaagaaagagggaccagattgggcccctggccctgcagtgcgtcccaatttatctgacgtagaaaccgggatttggaaaataccatcctggcttttctctggacttcacaatctagagggcgaggactgtggcccagtcaccttcccacacagtgcacagtagaaactccagacatgctttgtggagtggaaacatttccagtggcttctgactctagttcctgatgtggtttaaactaatttgggcagccatggcagcagaggccaggaacagtattcaatactttctgaacttgtgattctcccccaacctgatctgcatgaagctactttggaacatttgtatctgcgtaaaactaagagacctcagtacacccaatcccctcttccaacacatgtgaggtttccatgtgaaagtactttttcataggttacaataaattgcttgcagttacaaatttggaggtgtttcagcttgtattgtttcacgaggaatttcttaggggcacttggcctacaccctgtttttgttctagaattacctgccgttaaggtcagataaattttcagtaaacagattatggcacaaatcaatgtgtcctttcccggacagaagagatggctctctggccatgtcctaacaccagactgtccttatttaagaggcaggcgtgtcttttgtctaggttgtcttcaaatttaacccattaaaccagttaaccttatttcatatgtgaagggctttgatgtggacaagatgaggcacaaacttttcatataatttccacatttttagcaacaggtttttttctccaacaacagttttcatcataaaaggtgactaaaccagcaaatgagaagacaaataacattgaagaacatgagctattgaaacttactttttattattttttccagttacccagcatgccacaatctgattgctgacctggatggaacagagtgaaataaatgatttacaaagagatatttacattcatctggtttagacttaatatgccacaacgcaccacgaccttcccagggtgacaccgcctcagcctgcagtggggctggtcctcatcaacgcgggcgctgtccccgcacgcagtcgggctggagctggagtctgactctagctgagcagagctcctggtgtatgttttcagaaatggcttgaagttatgtgtttaaatctgctcattcgtatgctaggttatacatatgattttcaataaatgaactttttaaagac

SEQ ID NO: 327 - DNA, 3035 bp, Homo Sapiens
cacacacagacaatgaaaaggggttgtgcgagggtctcacccacacgcttttccagcttgcccactgcgcaggcgtgccccgaaagaccagcttgaacaatgaagaggacctcggcgttaggtgggaccgcaaccaacaaggactacagttcccagcgggcagagcgccaactccaagtgaaggtccggttgctgggcatgctaggagttgtagtgtcggccgcctttacaatctaggctgtttggaagatttagagcttctatttcttgaagatttattcgaccgttttaaaaaatctcgcaactgaagcagggttcagagtttactatctgcgtccttgagtagcctggggatcaactgctgcatattagcaaatttcgaagcgtcaaggccttcagtgagccctttctgtcatttgggtggtccaggcagctgaagagtgggatggaggcgggactaaaccaggctgggctggaggaaaagggcggggcctgcaagcctgtctcttggcagcaggctctggcagccaaaccgtccaagctagcgcctggagcgcagtggtttctgggaattgtagtgtaactggaaggccctgaggattgtcgagcttgcaggttctgaacgtgaggactacaactcccgacgtgcaaagcgagggccagtgggtgggaagagcccccaagagctctgtgcgggattctaggctcccctgtgacagccgcggcaggaagcaggcgggcgctccccggccacaggcctgttgttctcggaagggagaaagctggacatttccccacgtaactcccagctctgggcctagagtgcgtgcatggcgaagtccccggagaactctaccctggaggagattctggggcagtatcaacggagtctccgggaacatgccagcagaagcattcaccaactgacatgtgccctgaaagaaggcgatgtcactattggagaagatgcaccaaatctttcttttagcaccagtgtgggaaatgaggacgccaggacagcctggcccgaattacaacagagccatgctgttaatcagctcaaagatttgttgcgccaacaagcagataaggaaagtgaagtatctccgtcaagaagaagaaaaatgtcccccttgaggtcattagaacatgaggaaaccaatatgcctactatgcacgaccttgttcatactattaatgaccagtctcaatatattcatcatttagaggcagaagttaagttctgcaaggaggaactctctggaatgaaaaataaaatacaagtagttgtgcttgaaaacgaagggctccagcaacagctaaaatctcaaagacaagaggagacactgagggaacaaacacttctggatgcatccggaaacatgcacaattcttggattacaacaggtgaagattctggggtgggcgaaacctccaaaagaccattttcccatgacaatgcagattttggcaaagctgcatctgctggtgagcagctagaactggagaagctaaaacttacttatgaggaaaagtgtgaaattgaggaatcccaattgaagtttttgaggaacgacttagctgaatatcagagaacttgtgaagatcttaaagagcaactaaagcataaagaatttcttctggctgctaatacttgtaaccgtgttggtggtctttgtttgaaatgtgctcagcatgaagctgttctttcccaaacccatactaatgttcatatgcagaccatcgaaagactggttaaagaaagagatgacttgatgtctgcactagtttccgtaaggagcagcttggcagatacgcagcaaagagaagcaagtgcttatgaacaggtgaaacaagttttgcaaatatctgaggaagccaattttgaaaaaaccaaggcaagctttaatccagtgtgaccagttgaggaaggagctggagaggcaggcggagcgacttgaaaaagaacttgcatctcagcaagagaaaagggccattgagaaagacatgatgaaaaaggaaataacgaaagaaagggagtacatgggatcaaagatgttgatcttgtctcagaatattgcccaactggaggcccaggtggaaaaggttacaaaggaaaagatttcagctattaatcaactggaggaaattcaaagccagctggcttctcgggaaatggatgtcacaaaggtgtgtggagaaatgcgctatcagctgaataaaaccaacatggagaaggatgaggcagaaaaggagcacagagagttcagagcaaaaactaacagggatcttgaaattaaagatcaggaaatagagaaattgagaatagaactggatgaaagcaaacaacacttggaacaggagcagcagaaggcagccctggccagagaggagtgcctgagactaacagaactgctgggcgaatctgagcaccaactgcacctcaccagacaggaaaaagatagcattcagcagagctttagcaaggaagcaaaggcccaagcccttcaggcccagcaaagagagcaggagctgacacagaagatacagcaaatggaggcccagcatgacaaaactgaaaatgaacagtatttgttgctgacctcccagaatacatttttgacaaagttaaaggaagaatgctgtacattagccaagaaactggaacaaatctctcaaaaaaccagatctgaaatagctcaactcagtcaagaaaaaaggtatacatatgataaattgggaaagttacagagaagaaatgaagaattggaggaacagtgtgtccagcatgggagagtacatgagacgatgaagcaaaggtaatcaagctggataagcacagccaggccacagcccagcagctggtgcagctcctcagcaagcagaaccagcttctcctggagaggcagagcctgtcggaagaggtggaccggctgcggacccagttacccagcatgccacaatcttaatatgccacaacgcaccacgaccttcccagggtgacaccgcctcagcctgcagtggggctggtcctc

SEQ ID NO: 328 - protein, 362 aa, Homo Sapiens [sequence omitted]

SEQ ID NO: 329 - DNA, 540 bp, Homo Sapiens
atgcacttaggggatgcggaggcggcagcaaggggctcgggaaagccggggggccgcaggactggagctccggggggcggcggcggtaacggcaaagaccgactgcctagtgcgcaggcgcctcgggaaagggcgaggagccggaccctatcccctcctgcccagttccaacgatcccttactgcgcaggcgccacacacagacaatgaaaaggggttgtgcgagggtctcacccacacgcttttccagcttgcccactgcgcaggcgtgccccgaaagaccagcttgaacaatgaagaggacctcggcgttaggtgggaccgcaaccaacaaggactacagttcccagcgggcagagcgccaactccaagtgaagtggatttgctgtttgacttctctaaagatatctcttgctttgggtcgcctatgcccttttacaagaaattggagacatttaatgattcttcttcaaaacgagagttctggcagaaaaaccggaaggctttgttgcccccacagatctgttgtattattcctaca

SEQ ID NO: 330 - protein, 180 aa, Homo Sapiens
MHLGDAEAAARGSGKPGGRRTGAPGGGGGNGKDRLPSAQAPRERARSRTLSPPAQFQRSLTAQAPHTDNEKGLCEGLTHTLFQLAHCAGVPRKTSLNNEEDLGVRWDRNQQGLQFPAGRAPTPSEVDLLFDFSKDISCFGSPMPFYKKLETFNDSSSKREFWQKNRKALLPPQICCIIPT

SEQ ID NO: 331 - DNA, 2427 bp, Homo Sapiens
atgatttcacctttaaaaactgccttcctgagtaagtgtccgtttggtcaaccagactccatgggtcctaactttcgtcaggttgttcttgcagaacatgccagcagaagcattcaccaactgacatgtgccctgaaagaaggcgatgtcactattggagaagatgcaccaaatctttcttttagcaccagtgtgggaaatgaggacgccaggacagcctggcccgaattacaacagagccatgctgttaatcagctcaaagatttgttgcgccaacaagcagataaggaaagtgaagtatctccgtcaagaagaagaaaaatgtcccccttgaggtcattagaacatgaggaaaccaatatgcctactatgcacgaccttgttcatactattaatgaccagtctcaatatattcatcatttagaggcagaagttaagttctgcaaggaggaactctctggaatgaaaaataaaatacaagtagttgtgcttgaaaacgaagggctccagcaacagctaaaatctcaaagacaagaggagacactgagggaacaaacacttctggatgcatccgagaagctaaaacttacttatgaggaaaagtgtgaaattgaggaatcccaattgaagtttttgaggaacgacttagctgaatatcagagaacttgtgaagatcttaaagagcaactaaagcataaagaatttcttctggctgctaatacttgtaaccgtgttggtggtctttgtttgaaatgtgctcagcatgaagctgttctttcccaaacccatactaatgttcatatgcagaccatcgaaagactggttaaagaaagagatgacttgatgtctgcactagtttccgtaaggagcagcttggcagatacgcagcaaagagaagcaagtgcttatgaacaggctttaatccagtgtgaccagttgaggaaggagctggagaggcaggcggagcgacttgaaaaagaacttgcatctcagcaagagaaaagggccattgagaaagacatgatgaaaaaggaaataacgaaagaaagggagtacatgggatcaaagatgttgatcttgtctcagaatattgcccaactggaggcccaggtggaaaaggttacaaaggaaaagatttcagctattaatcaactggaggaaattcaaagccagctggcttctcgggaaatggatgtcacaaaggtgtgtggagaaatgcgctatcagctgaataaaaccaacatggagaaggatgaggcagaaaaggagcacagagagttcagagcaaaaactaacagggatcttgaaattaaagatcagcaaggtgctaaccagtctgcccccacgaccacttcagagcctttggacttgctcttttcttcgccgggttctctgggatatcctgtggatcacaaaataacccttcaagtcatcgctgaaatcatctgtaacatgtcattaattttggtgaaaaccttccaacaaaataaggttaaattgtccagttttccagtggaagaggaattattttgtgtcaccaacaagcagagtaacagcttaaaggaaatagagaaattgagaatagaactggatgaaagcaaacaacacttggaacaggagcagcagaaggcagccctggccagagaggagtgcctgagactaacagaactgctgggcgaatctgagcaccaactgcacctcaccagtgaaaatcgagcccagatcagaactgtggaggaacccaaattcagatcctacactcaaactgatttgcacaaagaattatctgttaaaagtgggaaaaagaatggcagcatgcgacaactcacttcatttgacaatgaccttgaggggctttgcttcttgaagaagaaagcagaagcttgcggtaaacaaagttcacttctgacagatggattgaatgacagaaaggttgcgagtgccagaatagccctggcagaggaggaaatgttcagtggaatccaacaggagaggagacaggaaaaagatagcattcagcagagctttagcaaggaagcaaaggcccaagcccttcaggcccagcaaagagagcaggagctgacacagaagatacagcaaatggaggcccagcatgacaaaactgatatgttaactaaccaagtgagtgacttcaatgaagatgctgccaattccttcattcctactgtcttagaacctgtgcaaggattaaatatgaatgtttattttggctgtagtccctgggcagtgagagtgagggaatggaaggctgtgggagctcagagcatggacccagtcagttcagtctccatcatcctagttttctggatcttccaactccttattcatcgaatgaaccgggagcatgcagaatttatcttggtggaaagcctttctcctcagttttctctccctgttttggtttac

SEQ ID NO: 332 - protein, 809 aa, Homo Sapiens
MISPLKTAFLSKCPFGQPDSMGPNFRQVVLAEHASRSIHQLTCALKEGDVTIGEDAPNLSFSTSVGNEDARTAWPELQQSHAVNQLKDLLRQQADKESEVSPSRRRKMSPLRSLEHEETNMPTMHDLVHTINDQSQYIHHLEAEVKFCKEELSGMKNKIQVVVLENEGLQQQLKSQRQEETLREQTLLDASEKLKLTYEEKCEIEESQLKFLRNDLAEYQRTCEDLKEQLKHKEFLLAANTCNRVGGLCLKCAQHEAVLSQTHTNVHMQTIERLVKERDDLMSALVSVRSSLADTQQREASAYEQALIQCDQLRKELERQAERLEKELASQQEKRAIEKDMMKKEITKEREYMGSKMLILSQNIAQLEAQVEKVTKEKISAINQLEEIQSQLASREMDVTKVCGEMRYQLNKTNMEKDEAEKEHREFRAKTNRDLEIKDQQGANQSAPTTTSEPLDLLFSSPGSLGYPVDHKITLQVIAEIICNMSLILVKTFQQNKVKLSSFPVEEELFCVTNKQSNSLKEIEKLRIELDESKQHLEQEQQKAALAREECLRLTELLGESEHQLHLTSENRAQIRTVEEPKFRSYTQTDLHKELSVKSGKKNGSMRQLTSFDNDLEGLCFLKKKAEACGKQSSLLTDGLNDRKVASARIALAEEEMFSGIQQERRQEKDSIQQSFSKEAKAQALQAQQREQELTQKIQQMEAQHDKTDMLTNQVSDFNEDAANSFIPTVLEPVQGLNMNVYFGCSPWAVRVREWKAVGAQSMDPVSSVSIILVFWIFQLLIHRMNREHAEFILVESLSPQFSLPVLVY

SEQ ID NO: 333 - DNA, 3059 bp, Homo Sapiens
cacacacagacaatgaaaaggggttgtgcgagggtctcacccacacgcttttccagcttgcccactgcgcaggcgtgccccgaaagaccagcttgaacaatgaagaggacctcggcgttaggtgggaccgcaaccaacaaggactacagttcccagcgggcagagcgccaactccaagtgaaggtccggttgctgggcatgctaggagttgtagtgtcggccgcctttacaatctaggctgtttggaagatttagagcttctatttcttgaagatttattcgaccgttttaaaaaatctcgcaactgaagcagggttcagagtttactatctgcgtccttgagtagcctggggatcaactgctgcatattagcaaatttcgaagcgtcaaggccttcagtgagccctttctgtcatttgggtggtccaggcagctgaagagtgggatggaggcgggactaaaccaggctgggctggaggaaaagggcggggcctgcaagcctgtctcttggcagcaggctctggcagccaaaccgtccaagctagcgcctggagcgcagtggtttctgggaattgtagtgtaactggaaggccctgaggattgtcgagcttgcaggttctgaacgtgaggactacaactcccgacgtgcaaagcgagggccagtgggtgggaagagcccccaagagctctgtgcgggattctaggctcccctgtgacagccgcggcaggaagcaggcgggcgctccccggccacaggcctgttgttctcggaagggagaaagctggacatttccccacgtaactcccagctctgggcctagagtgcgtgcatggcgaagtccccggagaactctaccctggaggagattctggggcagtatcaacggagtctccggggttgttcttgcagaacatgccagcagaagcattcaccaactgacatgtgccctgaaagaaggcgatgtcactattggagaagatgcaccaaatctttcttttagcaccagtgtgggaaatgaggacgccaggacagcctggcccgaattacaacagagccatgctgttaatcagctcaaagatttgttgcgccaacaagcagataaggaaagtgaagtatctccgtcaagaagaagaaaaatgtcccccttgaggtcattagaacatgaggaaaccaatatgcctactatgcacgaccttgttcatactattaatgaccagtctcaatatattcatcatttagaggcagaagttaagttctgcaaggaggaactctctggaatgaaaaataaaatacaagtagttgtgcttgaaaacgaagggctccagcaacagctaaaatctcaaagacaagaggagacactgagggaacaaacacttctggatgcatccggaaacatgcacaattcttggattacaacaggtgaagattctggggtgggcgaaacctccaaaagaccattttcccatgacaatgcagattttggcaaagctgcatctgctggtgagcagctagaactggagaagctaaaacttacttatgaggaaaagtgtgaaattgaggaatcccaattgaagtttttgaggaacgacttagctgaatatcagagaacttgtgaagatcttaaagagcaactaaagcataaagaatttcttctggctgctaatacttgtaaccgtgttggtggtctttgtttgaaatgtgctcagcatgaagctgttctttcccaaacccatactaatgttcatatgcagaccatcgaaagactggttaaagaaagagatgacttgatgtctgcactagtttccgtaaggagcagcttggcagatacgcagcaaagagaagcaagtgcttatgaacaggtgaaacaagttttgcaaatatctgaggaagccaattttgaaaaaaccaaggcaagctttaatccagtgtgaccagttgaggaaggagctggagaggcaggcggagcgacttgaaaaagaacttgcatctcagcaagagaaaagggccattgagaaagacatgatgaaaaaggaaataacgaaagaaagggagtacatgggatcaaagatgttgatcttgtctcagaatattgcccaactggaggcccaggtggaaaaggttacaaaggaaaagatttcagctattaatcaactggaggaaattcaaagccagctggcttctcgggaaatggatgtcacaaaggtgtgtggagaaatgcgctatcagctgaataaaaccaacatggagaaggatgaggcagaaaaggagcacagagagttcagagcaaaaactaacagggatcttgaaattaaagatcaggaaatagagaaattgagaatagaactggatgaaagcaaacaacacttggaacaggagcagcagaaggcagccctggccagagaggagtgcctgagactaacagaactgctgggcgaatctgagcaccaactgcacctcaccagatctgaaatagctcaactcagtcaagaaaaaaggtatacatatgataaattgggaaagttacagagaagaaatgaagaattggaggaacagtgtgtccagcatgggagagtacatgagacgatgaagcaaaggctaaggcagctggataagcacagccaggccacagcccagcagctggtgcagctcctcagcaagcagaaccagcttctcctggagaggcagagcctgtcggaagaggtggaccggctgcggacccagttacccagcatgccacaatctgattgctgacctggatggaacagagtgaaataaatgatttacaaagagatatttacattcatctggtttagacttaatatgccacaacgcaccacgaccttcccagggtgacaccgcctcagcctgcagtggggctggtcctcatcaacgcgggcgctgtccccgcacgcagtcgggctggagctggagtctgactctagctgagcagagctcctggtgtatgttttcagaaatggcttgaagttatgtgtttaaatctgctcattcgtatgctaggttatacatatgattttcaataaatgaactttttaaagac

SEQ ID NO: 334 - protein, 264 aa, Homo Sapiens [sequence omitted]

SEQ ID NO: 335 - DNA, 3046 bp, Homo Sapiens
cacacacagacaatgaaaaggggttgtgcgagggtctcacccacacgcttttccagcttgcccactgcgcaggcgtgccccgaaagaccagcttgaacaatgaagaggacctcggcgttaggtgggaccgcaaccaacaaggactacagttcccagcgggcagagcgccaactccaagtgaaggtccggttgctgggcatgctaggagttgtagtgtcggccgcctttacaatctaggctgtttggaagatttagagcttctatttcttgaagatttattcgaccgttttaaaaaatctcgcaactgaagcagggttcagagtttactatctgcgtccttgagtagcctggggatcaactgctgcatattagcaaatttcgaagcgtcaaggccttcagtgagccctttctgtcatttgggtggtccaggcagctgaagagtgggatggaggcgggactaaaccaggctgggctggaggaaaagggcggggcctgcaagcctgtctcttggcagcaggctctggcagccaaaccgtccaagctagcgcctggagcgcagtggtttctgggaattgtagtgtaactggaaggccctgaggattgtcgagcttgcaggttctgaacgtgaggactacaactcccgacgtgcaaagcgagggccagtgggtgggaagagcccccaagagctctgtgcgggattctaggctcccctgtgacagccgcggcaggaagcaggcgggcgctccccggccacaggcctgttgttctcggaagggagaaagctggacatttccccacgtaactcccagctctgggcctagagtgcgtgcatggcgaagtccccggagaactctaccctggaggagattctggggcagtatcaacggagtctccgggaacatgccagcagaagcattcaccaactgacatgtgccctgaaagaaggcgatgtcactattggagaagatgcaccaaatctttcttttagcaccagtgtgggaaatgaggacgccaggacagcctggcccgaattacaacagagccatgctgttaatcagctcaaagatttgttgcgccaacaagcagataaggaaagtgaagtatctccgtcaagaagaagaaaaatgtcccccttgaggtcattagaacatgaggaaaccaatatgcctactatgcacgaccttgttcatactattaatgaccagtctcaatatattcatcatttagaggcagaagttaagttctgcaaggaggaactctctggaatgaaaaataaaatacaagtagttgtgcttgaaaacgaagggctccagcaacagctaaaatctcaaagacaagaggagacactgagggaacaaacacttctggatgcatccggaaacatgcacaattcttggattacaacaggtgaagattctggggtgggcgaaacctccaaaagaccattttcccatgacaatgcagattttggcaaagctgcatctgctggtgagcagctagaactggagaagctaaaacttacttatgaggaaaagtgtgaaattgaggaatcccaattgaagtttttgaggaacgacttagctgaatatcagagaacttgtgaagatcttaaagagcaactaaagcataaagaatttcttctggctgctaatacttgtaaccgtgttggtggtctttgtttgaaatgtgctcagcatgaagctgttctttcccaaacccatactaatgttcatatgcagaccatcgaaagactggttaaagaaagagatgacttgatgtctgcactagtttccgtaaggagcagcttggcagatacgcagcaaagagaagcaagtgcttatgaacaggtgaaacaagttttgcaaatatctgaggaagccaattttgaaaaaaccaaggcaagctttaatccagtgtgaccagttgaggaaggagctggagaggcaggcggagcgacttgaaaaagaacttgcatctcagcaagagaaaagggccattgagaaagacatgatgaaaaaggaaataacgaaagaaagggagtacatgggatcaaagatgttgatcttgtctcagaatattgcccaactggaggcccaggtggaaaaggttacaaaggaaaagatttcagctattaatcaactggaggaaattcaaagccagctggcttctcgggaaatggatgtcacaaaggtgtgtggagaaatgcgctatcagctgaataaaaccaacatggagaaggatgaggcagaaaaggagcacagagagttcagagcaaaaactaacagggatcttgaaattaaagatcaggaaatagagaaattgagaatagaactggatgaaagcaaacaacacttggaacaggagcagcagaaggcagccctggccagagaggagtgcctgagactaacagaactgctgggcgaatctgagcaccaactgcacctcaccagatctgaaatagctcaactcagtcaagaaaaaaggtatacatatgataaattgggaaagttacagagaagaaatgaagaattggaggaacagtgtgtccagcatgggagagtacatgagacgatgaagcaaaggctaaggcagctggataagcacagccaggccacagcccagcagctggtgcagctcctcagcaagcagaaccagcttctcctggagaggcagagcctgtcggaagaggtggaccggctgcggacccagttacccagcatgccacaatctgattgctgacctggatggaacagagtgaaataaatgatttacaaagagatatttacattcatctggtttagacttaatatgccacaacgcaccacgaccttcccagggtgacaccgcctcagcctgcagtggggctggtcctcatcaacgcgggcgctgtccccgcacgcagtcgggctggagctggagtctgactctagctgagcagagctcctggtgtatgttttcagaaatggcttgaagttatgtgtttaaatctgctcattcgtatgctaggttatacatatgattttcaataaatgaactttttaaagac

SEQ ID NO: 336 - protein, 362 aa, Homo Sapiens [sequence omitted]

SEQ ID NO: 337 - DNA, 17831 bp, Mus Musculus
gtctgcagaactcctaagctggatgcagagagcctcaagttgctaggaggaaatgacccagagtttctcctctccacgctcagcagcagccaaaatccacaggcaggaggcgtcaccttagctgagctgagcttgaacattagaaggtacaggctgtgcacgcgcatgcgcaccagtctttgggaagagagtccaactcgagaagcttctgcaggaaagcagcactctaatgacgtgacagacatcctggggcattttagtgctagtatgtggctgtcccagggtatctttatcccaccatggccactgttttcaaactcctcagctctatgcgtgggtacagacagcctaggcaggaatcagtgcagtagcactcagaggacagacacctgggtggcatcgcctcggggctgtgttctcaggacagggcaccgtccttcaggtgtttcctggaaatttaactctgagatgagcaaggggtgtgcatgtgtgcatgcgtgtgtgtgcgtgttatgtgtgtgtgtgtgtgtgtgtgtgtgtgtgtgtgtgtgtattggctcgaggtcagtgttaggtggcttctatctctctttaccttgtttggaacagggcttataaaacttggattcccttgattcaggtaggatggctggcagccagttccaaagcttcctgtctctggctcagtgctgtggcactggctgggatccaaatgcaggtcctcctgcctgcgaacaagcacattagtagctgagccatctcctcggccttagaacgcgagcttttccaagcagcattgaaactatttctgagatgtcctctgctgaaaatcttgctcccttcccatctcctctcagatccagaaagtcacatttagctgctcccttgttttatgaacctgaagtgtaatgaacccatctacttgttgaaatagacaaggccacttcccagcaccgtggtatcctgacagtgctgctgcagacggtcacaacctccacctgtctggatcatatgctggcttccggtcccaggacctcttgattatcggacatcagggttaagcacagcaccgtgtatggcccatttccgcagtgcttttctgaactctagctcatagcaagtgtgagctccttgaaaacccaagtgtgccctttgcccaccactgcttgtggggcccacccacgggagaggtgcaatgctcacacggtagaggatagggccgcttttgggtctgagtctccccaccgtggggaaacatctgtttggttcccgagctgagtcaaaacaactttgcaagctctaaacggctgcctacaggtgtgccagggtgacggttatatttctgcagccagtttctgttcacaagcatttccttattttacctccatacagctttttttcccactctccagcagatggacccaggcaatctgacactcaggcaagtgggtcctctcgctttgtgctttgtaccggctcctctgacatgtagtctcagttgacatgaactaggcagtctgatggggtggtgctatgcatctctgggcttctttgcttcccgcagcctcataaccaaaggcttgctctcttatgtccagaaggagaatagtgggattctaaaactcacacaagtgcagctggtcccttggagagtgactccagtcactcagggtacttggctgtgagagctgtaagtgatctggggtgcttggctgacagactcacctctaccctaccgctccagatctctctctctctctctctctctctctctctctctctctctctctctctctctctctctccctccccccctctctctctcgtcagggtttctctgtgtagccctggctgtcctggaactcattctgtagaccaggctggccttgaaacccacctgcttctgcctcccaagttctgggattaaaattgtgaactaccactgcctggtgtcagattctctcctttaaaccagacgttggttacttttatatcgccgtgataaaacactgtaacgacaaaggtgacttgttaaaatgacaacaacaacaacaaacaacaacaaaaaaacatttaatgtggcttatggtttcagagggtgagagtccatgatgtgggagtgaaggaacacacgagagctcatctcttgatctacaacatggaggcacagaagtgcaggcatgcttcgaagtgcaggagccttttgaaaccccacagcccacacccagggacacatctcctccaacaagacacaagacttcctaaacctaaacagtcctgctgattagggaccaaatcctcgaatatatgaatgagctaatagggcccttctctctcaaagcaactgctcttttcatcttctgttatcactgcagtgtcctctgtctgttatcactgcagggcgctgaggatatacccacagaaatctgttgcttcctgaaactgctgcagtctaggaggtcaaataacagctactcctttggacatttaatccgtgtatacttttgtataggacagcctcgttactgaaaagctagaattgagcttcactcacagtgccttgcttatatcaaacacaatatctaatgtatgaagaaatcactaagcaccttaacttcggggagagacacatcaaatacgcattttgattatatacattcgaattgttaaatgttttaaacacaaaggagcgtagaatatgaactgctaacactaggtacccagatttaataggcgaggaatgttgtcatgtttcaccttcaggaaaggaaggattgaaaaatgcaataccgggctggtgagatggctcagtgggttagagcacccgactgctcttccgaaggtccagagttcaaatcccagcaaccacatggtggctcacaaccatccgtaacaagatctgaccccctcttctgagtgtctgaagacagctacaatgtacttacatataataaataaataaataaataaatctaaaaaaaaaaaaaaaagaaaaatgcaataccattttccttaaaaaaaaatattctcccagggatggagaggcgcttcagtagcgaagagcacttgctgctcttatagaggaccaaggttctgttcctagcacccacatggtggctcacaaccatctgcagctctgatgccctcttttggcctctgcagatgcctacatacacatggtgcacataaactcatatagactttcacatatatacatacgtaaagagaagtctattaaaactcatccatcatttaatatataatcataggtcaagaacgaagctattaggctagagagatggctcagtggttaagagcactgactgctcatccagaggtcctgagttcaatacctagcaatcacatggtggctcacacccatctgtaatgggatctgatgccctctttggtgtgtctgaagacagtgacagtgcactcatacatgaaataaaccttttttaaaaaaaggaacgaagctagtgacagctgttatatctgtgcaagcctgtcacagaaaggggggtgtctcatggaaccccacccctcaggatttatttctagttatggttgatcatagaggtagagacattttcttcagtggtataaccataaataaaggtgccttgctcctgtaaacaaaccctcactcattctgcaaacagatccaaaaaactcattgggtttcatacacacgcacatgggtgtgcgcgcgtgcgcgtgcgcgtgcacacacacacacacacacacacacacacacacacacgcacgcacgcacgcacaagcatgcatgcacacacacatgcacgtgcgcgcacaagcacacgcacccatgcacgcatgtatgcacgcacgcatgcacacacgcatgcacgagcacgtggacaatagatagggtgctaaggagattggtaacaatgggaaggggacaggagaggtgttgtgagttatgatacaatgtgacataaaacgtcatgatgaaacccattattacatacaacttaacgcatgctaacacacattttatgcaaggggttttctccaggtgcattagctgtatcagaaattggggttctacagaaacaattatcaaccatttgtccacaagcttccggaatgctgactctctactacaccgcttctccgttttctttgcttgctcacgttgatcgagcatcccattgtttttccaggagtgttctccctacgcggctcacctctacgatgccgagaacccccagacaccgctccggaaccttccgggcctctgctctgactactgctctgccttccaccgcagctgccactcggccatctccttgctaaccaatgaccgtggcctccaggagtcccatggcaaagatggtgctcgcttctgtcacctcctcaaccttcctgacgaggactactgcttccccaatgtcctgaggaacgatcaactcaaccgcaacctgggagtggtggctgaggaccagcagggctgcctgcagctctgcctggtcgaggtggccaatggcttgaggaaccctgtgtccatggtccacgctggggatggcacccaccgcttctttgtcgctgagcaggtaggagtggtgtgggtctacctccctgatgggagccgcctggaacagcccttcctggatctcaagagcatggtgctgaccacaccgtggatcggggatgagagaggcttcttgggtctcgcttttcaccccaaattccgccacaaccgcaagttctacatttattattcatgcctgggcaagaggaaggtggagaaaatccggattagtgagatgaaggtttccctgtctgacggcaacagagcagatcccaaatcagagaggtgagacaatcccacgagaaccgaaactctgctcccaaatgatgcccctccattcttaggatggtagcgaaggatggcactggttttcgagtgctagactaaaatgttaaggaaacaggttggacagatggtgctaagagccgtggtcgctcttgcagaggacctctgttcagtgccccagcacccacactgcatcacaaccctctataatttcagttctagggatatgactcccccttctggcagctgctggtaatgcatgcagattggtgtacaggggaaaaaataatgcacataaagatgttaaggaaagccacttctgacgaataaggacaacctgggtaacttcagagtggagcttctttaaggggtgtagccctcaccttacctaacctagttagagccatgcttgctcatgtttacaaagggctggcagccaaaagggattttagagtgattatagataatacattaaacacaacagtagcctctaattaattgtgtgggccctaggtaccagaccctttaccttcagtgtgagatttctatgtctagttgatgctctggtttcattctgtcgctgtgacaaggtagaggaggggggatttatttagcttatacttcctggccacagtcagtcaccaagagaaagcagagcaggaccccaagctggaacttgtaggtgggctggcttgctattccatagagcatcacctccagccgagggactcatctcacaggcatagatacagcaggagcaacagaggaggctgcttggtagctggatcccatgcagcaagcttccttgtgtggtccagctgtctaaggctattagtcattgtggtccttggagaccgaagccaggctgggctaactttgcagatcttggtggcttggacgagccaacctctgggtatctcagccatgctaaagcccaatgtgtagtttctctttctcttccagggtcatcttggagatagacgaaccagcctccaaccacaatggtggacagcttctctttggcctggatggttatctgtacatattcactggggacggagggcaggctggggatccctttggcaagttcggaaatgctcagaacaagtaagttgtatggagggctgtacccctgttcctttcacgtgtaccccggcacactgcttacctagagtcaaacttagaagatctaatccccccccactgcagccagtgagaggagcctttgggttaccttatcaataatacacacggaacactgtgctaactaatataaatgcttaatgtgactggacatggtagtacacacctttaatcccatcacttgggaggcagaggcaggtggagctctgtgagtttggggccagcctgatctacatagtgagtttcaggacatccagggctacagagtgggacccttcttcaataaacaaacaaacaaacaaacaaacaaacaagcaagctagctagctatcataatgccgtatagaaaataatttaaagattaaactcgaggacaacaaccgtctaatttgacttatatctcagtatacctcaggctctgtgcgaggcccagagacacaggagaagccagttaataagagctgagattatcgagtgcccacagtgttgacagtgaccgagtctcatattatccttgtttaaagggtgaggaaactttaatctgttttcattgttatgccattagtacgaggcctactgtaaacatgtatgaaagattcctatgtagggcttatgctttccgttttcctgccacgaaaaagacagaaactgcgacttggacactggtatgagagcccattggattaattaatgtcagtcacactaaggtggtatctgctgaatgctgtcattcagggatttcattacgtaccacgtgcatgcctgcccattaaatgtgttctcacaccagcagtgcgatactgcatcacagcccagcactcgaactcattagaagagcctcaaaaaagataaaaaaaaaaaaaaaaaaaaaaaaaaagaaaaaaaaaagaaaaaaaaagaaaaaaaaaaaggtgtgtttccccctccatccccccagcacactgggacaaacaaacaaacaaacaaaccaaccaaccaaccattatttatttttaagtttacaatattaagccaaattggagagcacccatcattaaaatagaaagccaaagcgtcaaagtactaagggtcacgtaagatgagggagtcttaaacatctcttatatatttaaaagaaccaggcgggtcaccctcccctctagggttcctagcagtctcctgcgaggcgtcagctctcagcggcctgcctggtcctctcctctgaccctttgcctttctcacttgtatccttgctcacccagcaggcctctttcttgccatcttgtctttcagaagttctctgctggggaaagtgttaaggattgatgtgaatggggcagacgtggatggccagcggtaccgagtgcccctggacaatccgtttgtctctgagccaggtgcccaccctgccgtctatgcttacggggtcagaaacatgtggcgctgtgctgtggaccgaggagaccccgtcacacaccggggccgaggtcggatattctgtggggacgtgggccagaacaagttcgaggaagtcgaccttatagttaaaggcgggaactatggctggagagccaaggaagggtttgaatgttatgacaagagactttgccgtaatgcgtccttgggtaagtagggtgccgtctgggtgctttgagtgagttgactaggttggcaggggaggtgggcggagacaacctgaatattctgagagctgtctccatggtagcttgttggattatgggatggtacctctctgctgccccaatcaggtacacccagaggcactttggtgatacttgtttgaaagtcggtccctgctggtcagtagtagttgcctagctcgaatccctgtgaattcagagccagcctcggatccacaaacccttctctctagcaatttcctttgctgaggtcactggaacacttgctctgttttacggaatggaaaatgaagccaactgatattgattggggccggtgagatggctcagtagatagagatgcttgatgccaaattgatgagcagagttgaccctgggacccacgtgatgggaaaccagctcctgaaagccgtcctcatcgcaaatgctcacacacataaatgcaatacttttaaaagaccatttgactcatatggtgtatgccagtcacatgcatttacattttgggtgagctgggtcacagggactaactagtactttaaagaagttacttgagtgtcttctaggcatactattttaagaactactggtagggcaaacttggtggctatgtgggctttaaatagtctaccagttggaacattctgccaaaatggtatcccccatacacaagaggaagaaagtgtgtacctcaaaattatcaatcaagatgctggagagccccacttgcttcaaagctagagactgacggtcacctccccttcttccttctctccctgagcatccttttgagacagggtctcatataacccaggctggctttatgaccgttgacccttctgtctccacctgtgtctcaagacttctggtatatctgccctgagagcctaattggggaaccaggtgttggggaggggatttggggtcgagataacagtttaacaggaaagttgcatccatgattggtctgctgaggaaaacgaaggattccattgccagtctcactaatgacccaaaactaaataagacaattgcattgagaagtccactgttgattccttagaactatccactcatgctgtgttctttgctcctttttttttcttcttggtcctgacagatgacattctgcccatctatgcttatggccatggggtaggaaagtcagtcactggagggtatgtctaccgtgggtgtgaatcccccaatctcaatggactctacatctttggggacttcatgagtgggtaaggaagtaattatttatttgttcttttttatttttaaagatttatttattttatgtatatgagtatactgtaactatcttcagatacaccagaagagggcatcagatcccattacagatggttgtgagccaccatgtggttgctgggagttgaactcaggacctacagaagagcagtcagtgctcttaacctctgagccatctctccagaccctgtttttgtttttttgtatgttctgaggcagggttttgatatttctggccaacctgcagcttaccatgtagaacagataggtctcaaactcaaggtaattcccctgtctcttagaggtgtgctttactatgctcagtgctagtacttgaggatccttgcttctaggagggaaaataaaactgtggagtggaaaatacggattcctacaacataaggttttacttttcatctagtcgacttatggctttgcaggaagataggaaaacccagaaatggacaaagcgagacatctgcttgggcaactcgacctgcgccttcccggggctgatcagtgcatacagcaggttcatcatctcctttgctgaagatgaagcaggtagcccttgctgtttaattgctcttccttaaccactgctatcagctgtgcatgtcttgtcatttaaacagtcactgtcacttctctcatgacgatccttgagtgagtttcacagcacactgggtaacaagtagccacaacacccaggagatgcagtcactattttcagtgtcatggggtggtggtgggacagattgattgttgattgttcccccaatccccaacccctgtcatggtgcaaaatatagctccttgtgaggaacacttcaagatctgtggtctcatctctgacttcggagaggtctgtgtcctccccatcagctgcttttagtctgagatgattaagagagtgtggtcaaggccccagcgggccaggctaaaagtgcaacccattcatattctcttgggcgctctaagaggagatgtgtgctcgatgattgggttagggtcttcctgactctgccaagagtatgtaaggaaagagacctggatgtaaaagctgtgtgtgtgtgtgagagagagagagagcaagagcaaggtatatggttatttattttacagaaggcaccattgcatcattggccattgaagccaaggtttgtacacatgtctaaggaacatgtttgctcctaagaatagataaccagagagtgcatgttttaaaaagagatttatttattttatgcatgtaagtacactgtagctgtcttcagacacaccagaagagggcatcggatattgaatcccattacagatggttgtgagccactatatagttgctgggaattaaactcaggacctctggaagaacggtcagtgttcttaaccattgagccatctctccaacccccagagagttcatttttagtctcagcgttccattagttaatgtttcaacttgaaaggttaaagtttcaaattttaaagaaattccattttgtttccctaagtatgcacaggatctttttgtctagccatgcttaggttaggtaaaaaaggcaataagatgatgtcataggctggggatgtagctcagttgctagagtgcctgaggcactgggctcatatctgtaatactgtatttaggactggaggcaggggaatccagaaactcaaggttatccttggcttacggggagtcggagactaatctcaccccccccccccacatacacacacacacacacacacacacacacacacacacatacacacagagagagagacagagagagagagagacagagacagagacagagagacagacacaaagacagagacagagacagagacagaaaaactgaaaaggagcaaaacccagtatctctgagcatctctcagatacctgagattctttataaatgggcggccagggccggggagtccctgagtttagctcttctcactcagagcctcagggtggcttcacaggaccctatcttgaggaggtaataaggaaatccagtcatctccctttcctctcctctcagtagctgctggatagacactttgacaggaatattcaatagcagcagagaatgctgtatattttcttcccctcagatataggtcagattagaccagatataaagtaataaaggcaggtttattaggaggcagctctcaggtgggctaaccagtctcacaggcggaggttagtgaagtcgcatatccaggctgaagcaaggggatttttatagagcttagggccatagagatggcgtgccagctaggagctgggattatatccattcatggcccagaactgagcccctgggcgtgcactcttgagtgggttgtcagaaacggggaggttaggttttctcagtgtgggcaaggttgggggagggagggcagataggggtttcccggcttgtgcaggggatgagcaggggtcccagcccaacagagggtattttagaaaattcaagaattttaaatagaaaaaagactatgagagttgcaaattgggaatccaaacatttaaaggaatagaaaaaaaaccacaggctggcaagaggctgctcagggaagagagggtggatcagtgcaagccattcatccgccctggtggggcctctctactggaacctcccagaaaggtgcttctctgcgacacagaatcctggctttggaggtttggtttgcagagcctgtagataccagtcagaagaggaaaaccggctgcctttggaaacagtcacttctagcaaacacagctagtgtcctctaggaagtgggactgtgccaaggctttgccctgggtcagccctgaggccagagaagctgcctctaggtgtgctcctttctcttgtaaaagctccttttcttgttctcccactgagactcttccagagcagaatttcgtctcctccatcagttgctagctttgggtaaggtgtctttccgtggaactagactggagcacttagacttgacactgcgtgttaactgaagagagcctaagtggatggctggcctggagcaatccctgggccattttgcgagctgacctaagtaaaggctggcctgaggaggatgcttgcgcaagccctgctgcattaaagttagctttctgcctgaaacagacattaagaggatggcaagatggatcatctggtaaaggtgccactaagcctgacaacctggattccatccaggtacccaaagagagatctgctttctgcagcttttcctccaatctccacacatgggccatgacacacacgcttctcatataccccaattcacaagtaagatgtaaaatagatactcaaaatgttagctccataccatcgataaaattttgtattttctcctaaatatagaactggaagttttgggtatgttcaaaacatacatattacataggctgtagcagataaagtaaacacacagtaagatagcccctgcttcccactttggagctcgtgtgtgttctagaaggttcctgtcagagcggcctgagtttgtgtgactattggaaggcagctcatttatctgatggtgtttggtgtttcctgtcaattagtacaactgaatccagagaaggatacgccctgactgacatcccttctcagaacagttataaacacgtcttctatcagtatgtgaagccacagtgtttacgatacttgttactaagaagtcacgtaagccttgtgagtgagtcgaatactgtgtaacccgctagcattgtgttgggttgacagagctgctgagacacttgctcccgagataaaaaagagtagagggctgaggagatggcccagttgtcaagtgtcaccctgcaagtacaaagaccccaagttcagttccccaacactcaggtataagctgggtgtggtagtgtgctgtgacctccgtgctggagaggaagaggcaggtggaccctggcgctcagcagccagccagcccagccagaccctgtttcaaacataagatggtgaagagtcaagagggacactcaacgtcaaccggtggcctctgtatgctgacgcatatgtgtgcacctcacatatatgaacacatacatacgcatcctccctcccttccccatgacaagccactctcaatgttattccgtgcttcctgaagcatggtgactctcttttatgagcgaattaatatggggagggggcagggtgttacgtagattgggaggtctctcagggtagcacagctctgaaacggtgttatgagagctcatgtctagaattacccaggtagcactggggctgaggcccaccctcaagcacaactatgcctggcacagacgaccaccgggtgcagggaagtagattcttccaccaggaagtaatggagatgttttccgaaagccaggcaggaaggactgggaggaagcggggctctttctaaatgtgatcctggagggtgtggttggaggtgtttggcatgggggtgtggagaggagcaagaggaaaggctgatagggtggggactggccagaaagaaatcaacaatgctgtcacctgtcaccgaggaagaaaatgccaaagccaggctgacaggaaacagggatggagggacagagcaaagtgactgccatcaggctgcagcgaatgggtgcctcaggggtggagctttactggggtgacatttctaggagaaaagaggagacagagagcagtctgacagatccagcagcacacacatggagtgtcctccactgggcctccttctaagaggttcaaaccatactggaggctcaaaggtgaactccttccctctcttccccctaagaagcctgcacctgcagcccagtgcagggccggctgtcaggcatccagcgctcacctgtgatggtcacgacactttaggactggtagcttcattcagttaagctagtttttccgtgtgtccagccctgctgatgtggtgtccttgtttctgcctcctgtctccttaggagagctgtatttcctggccacctcctacccaagtgcctatgcgccacatggatctatttacaagtttgtcgatccttcaaggtgagatttggtgtcatcttctcaggaattggttcatggacagatgtgcagacagatcccactgaggctgcttcctgactttgaagtgtggttcagtggatatgtgacaaatagatctaaccattgctcagggcccggcatagcttcacctaacagctgggctctccacccatgtgacctcagaagttcctgggggaggtctagttggtccccaaggctgtgccttagatgccctgcagagaagtagggtgtgggttgccacagggtgagccttgtctgggcagtctccactgaagctgtcccaccttcagagtgctctggtggggtgatctagcttgggaagggacttctcttcctgctaatagtttccaggctgaacctagttcctgctcctttggttcctgtatagttaagtttggttaggagataatccaaccactctctttcctcagaacagcctgaggaaccaaacacaaccagacagaaacggttggctgtgaacttcattgttggctttcttgagagaggagtctcatattataggttggcctggaactcatttagttgtcttgaactcaaggtagtcctcctgcctcggcctcctgagtgctgggcttgtaggtatgagtcacaaagcctggctttatgcacacacacgttgccagagtgctgagaggacagatatgggcctcaagccatggctaaggagactgacactgggtaagctcagccactggccatcacggggtgacagtgacatcagcaatgaatgtggagagaactggctgggaggttccagttcagtgcccaaagccccatttgtttcaggcattgcacatggggacatgcaacttaactgcaaggcgaggctagctggtgaggatgggccgtgcttagcttctgtcccattgtccctttgaagggatttttcttaaagtgattcattattttttttttttaaagatttatttattattatatgtaagtactctgtagctatcttcagacacaccagaagagggagtcagatcttgttacggatggttgtgagccaccatgtggttgctggaatttgaactccagaccttcagaagagcaattgggtgctcttacccactgagccatctcaccagcccaaagtgattcattattaccattgcaacaattattactaccatcaccaccatcaccatcactgtcactatcatcaccaccatcatcacatcaccattatcaccaccaacattaccaccatcaccaccaccatcatcacatcaccattatcaccaccaacattaccaccatcatcaccaccatcaccgtcaccatcaacaccatcatcactaccatcatcaccatcaccaccatcaccaccatcgtcaccatcaacaccatcatcaccatcatcaccactatcaccaccatcaccatccccattatctgttcagcacttactatctgttggaccttgtccaaatgttatttttttaaactccattcttcaccagtcacttatggtgtggcagagacacagctctcagttaaccttcactatttccctgtgagccattgaaaaccattttttttttcatttcatagatgcataaattgaggctttgtaagatgtcctgggctactctgatatggacccagttgtgcctgtcaccagaccccatgctgacctccattctccactgcctcctgaaggcactggggacccttcctcctctccatctgagctcagcgcacactcctaccataactacccagcccctggacaagaaagggccaagcccagctcttgtaaatgtacaccctgaggagacctcgatgtgtgattgtgatttcaccaacttgtgacactgccctctctgcccgtgtttataggcgagccccaccaggcaagtgcaaatacaagccagtgcccgtgaaaaccaagagtaagaaggtccggttccggccactcgccggtgagtcccttcctgaggtttggcttagtcatgggtacagccacatccttagcaaacacgtggtaatcccctgggtggagggtcagactttcctgttttcttcttgtaatatttattgtgtctgcatgctttgcctgcatttgtatatgtgcactgcctgtgtgtgtgtgtgtgtgtgtgtgtgtgtgtgtgtgtgtgtgtgtgcaggagcctacagagcccagaatgaggcttcagatgccctgtaacccgggttcctgttggttgtgagccactgggtggtgctgggaactgatcctgggccttcagcaagagcagatagtgctcttaatggctgagctgtcttgagctccaggggtcataattcctctctaaagggttatgaggactattaacttgtagctcagtgtatgcatctcttctgcagaccggaattagtgggatgcctgcttctactgtgatctgctgtcctctagtcatccgtccatgcatgcatgcaattgtttatgtattcattcatttggtgataattattcagtatttactttgtgggaggttctgtgctaagcctggagatacagcaacagatactcaacacctctgatctatgcaaatttggagtcagatgggagggggacatagagaaataagttagttgtgaggttctggtttggaggctatgtaggttactgtgagggagcctgaggtgaggaattcttcatggtaaaacagggagtcatggaagacttttaagaggcaagatgcaatcttaggcagacatcccagaaccacttatctctggagtgacctcaatccacaaaggaaggcatttactgccaggcctgataggggtattaaaacaatgtcaatacaaacaattgataccacagttcccttatggcaagctgggtgtggcggcactcacagtaccagttcctcaggaggcagaggtaggaggattgcttgaaccagagttggaggccagcccagagaactctgccaggccctgtgaggttccttagggctccttttacagcttcttcctggggtgtccctttctcactgaatcaatgcttaccttccagccacagtcttggacttgctgaaggaggaatcgcagaaagcagcccgaaaagcatccaacgcaaccttcacttctagctcagacagggttgcatctcagaagggctccctcaagaagccagcttcttcccgaagcagcaagaaaacatttcgaaggcctggtaccaagaagaaaagcagagtgtggtccccacgtccccagggcaagaggaagcccaatcttgacagccatggtgtcgggatgagacaggccgcaggcagaagtcacccatgacctcttggtcatcttggccgatgagacctgagacaggagaatgcttcactgagtgcataatgctgtccattctgagtctgggactcagacagtcaagaagcctgggtggcggtgggctgttttctgtgtggtcttttccctccctgggaaatcttgctgtctactgaagaaacatgagcctggtctgcgggcagcatttctgtggagataccacagcccacaggaccttgcacgtggcttatggcatgtccagtgtgcatacctgcctggcatcccacctgacatcctttctacctggggtaataaattacctttggcttacacgtacacatcctttgatctcagtgtttggcaatggggaatctagcatgtttcagccagcttgctttagcagctcgctcctctctgctgctgcctgtgactggctcctatgtaagccctctggaagatagatggcccctttctttcctccagacagaagcctgtgaactgaagacaaggaggcttgcctctgctcctccagcagtt

SEQ ID NO: 338 - DNA, 2510 bp, Mus Musculus
gtctgcagaactcctaagctggatgcagagagcctcaagttgctaggaggaaatgacccagagtttctcctctccacgctcagcagcagccaaaatccacaggcaggaggcgtcaccttagctgagctgagcttgaacattagaaggagtgttctccctacgcggctcacctctacgatgccgagaacccccagacaccgctccggaaccttccgggcctctgctctgactactgctctgccttccaccgcagctgccactcggccatctccttgctaaccaatgaccgtggcctccaggagtcccatggcaaagatggtgctcgcttctgtcacctcctcaaccttcctgacgaggactactgcttccccaatgtcctgaggaacgatcaactcaaccgcaacctgggagtggtggctgaggaccagcagggctgcctgcagctctgcctggtcgaggtggccaatggcttgaggaaccctgtgtccatggtccacgctggggatggcacccaccgcttctttgtcgctgagcaggtaggagtggtgtgggtctacctccctgatgggagccgcctggaacagcccttcctggatctcaagagcatggtgctgaccacaccgtggatcggggatgagagaggcttcttgggtctcgcttttcaccccaaattccgccacaaccgcaagttctacatttattattcatgcctgggcaagaggaaggtggagaaaatccggattagtgagatgaaggtttccctgtctgacggcaacagagcagatcccaaatcagagagggtcatcttggagatagacgaaccagcctccaaccacaatggtggacagcttctctttggcctggatggttatctgtacatattcactggggacggagggcaggctggggatccctttggcaagttcggaaatgctcagaacaaaagttctctgctggggaaagtgttaaggattgatgtgaatggggcagacgtggatggccagcggtaccgagtgcccctggacaatccgtttgtctctgagccaggtgcccaccctgccgtctatgcttacggggtcagaaacatgtggcgctgtgctgtggaccgaggagaccccgtcacacaccggggccgaggtcggatattctgtggggacgtgggccagaacaagttcgaggaagtcgaccttatagttaaaggcgggaactatggctggagagccaaggaagggtttgaatgttatgacaagagactttgccgtaatgcgtccttggatgacattctgcccatctatgcttatggccatggggtaggaaagtcagtcactggagggtatgtctaccgtgggtgtgaatcccccaatctcaatggactctacatctttggggacttcatgagtggtcgacttatggctttgcaggaagataggaaaacccagaaatggacaaagcgagacatctgcttgggcaactcgacctgcgccttcccggggctgatcagtgcatacagcaggttcatcatctcctttgctgaagatgaagcaggagagctgtatttcctggccacctcctacccaagtgcctatgcgccacatggatctatttacaagtttgtcgatccttcaaggcgagccccaccaggcaagtgcaaatacaagccagtgcccgtgaaaaccaagagtaagaaggtccggttccggccactcgccgccacagtcttggacttgctgaaggaggaatcgcagaaagcagcccgaaaagcatccaacgcaaccttcacttctagctcagacagggttgcatctcagaagggctccctcaagaagccagcttcttcccgaagcagcaagaaaacatttcgaaggcctggtaccaagaagaaaagcagagtgtggtccccacgtccccagggcaagaggaagcccaatcttgacagccatggtgtcgggatgagacaggccgcaggcagaagtcacccatgacctcttggtcatcttggccgatgagacctgagacaggagaatgcttcactgagtgcataatgctgtccattctgagtctgggactcagacagtcaagaagcctgggtggcggtgggctgttttctgtgtggtcttttccctccctgggaaatcttgctgtctactgaagaaacatgagcctggtctgcgggcagcatttctgtggagataccacagcccacaggaccttgcacgtggcttatggcatgtccagtgtgcatacctgcctggcatcccacctgacatcctttctacctggggtaataaattacctttggcttacacgtacacatcctttgatctcagtgtttggcaatggggaatctagcatgtttcagccagcttgctttagcagctcgctcctctctgctgctgcctgtgactggctcctatgtaagccctctggaagatagatggcccctttctttcctccagacagaagcctgtgaactgaagacaaggaggcttgcctctgctcctccagcagtt

SEQ ID NO: 339 - protein, 497 aa, Mus Musculus
MVHAGDGTHRFFVAEQVGVVWVYLPDGSRLEQPFLDLKSMVLTTPWIGDERGFLGLAFHPKFRHNRKFYIYYSCLGKRKVEKIRISEMKVSLSDGNRADPKSERVILEIDEPASNHNGGQLLFGLDGYLYIFTGDGGQAGDPFGKFGNAQNKSSLLGKVLRIDVNGADVDGQRYRVPLDNPFVSEPGAHPAVYAYGVRNMWRCAVDRGDPVTHRGRGRIFCGDVGQNKFEEVDLIVKGGNYGWRAKEGFECYDKRLCRNASLDDILPIYAYGHGVGKSVTGGYVYRGCESPNLNGLYIFGDFMSGRLMALQEDRKTQKWTKRDICLGNSTCAFPGLISAYSRFIISFAEDEAGELYFLATSYPSAYAPHGSIYKFVDPSRRAPPGKCKYKPVPVKTKSKKVRFRPLAATVLDLLKEESQKAARKASNATFTSSSDRVASQKGSLKKPASSRSSKKTFRRPGTKKKSRVWSPRPQGKRKPNLDSHGVGMRQAAGRSHP

SEQ ID NO: 340 - DNA, 25785 bp, Homo Sapiens
cagcccgagtgttcccaaggccaaaatgctgagaacgtccactcctaatctgtgtggtggtctgcattgccgggccccctggctctcttctggcattctctgcctctgcctcatattcttgttgggccaggtgggcttgctgcagggacacccccagtgcctggattacgggccccctttccagccccctctgcaccttgagttttgctctgactatgagtccttcggctgctgtgatcagcacaaggaccgccgcatcgctgcccggtactgggacatcatggaatattttgatctgaagagacatgagctgtgtggagattacattaaagacatcctttgccaggtagtgaaaagtgccttccagccccaggggtttgggtgctgggctgcatggtgtgggtcctgagcggagggtgctttgggagcccagccctttagaagttcatgtgccgggtgcctcatcttggagctgccggctttggacacgcacactgacatgagtgtgtgctgaatttggtctccatgggttccccaaagctctccctctgggattctgctggccctgattcttctccaggctccaggagaatgagagggacactcttcctggagctctcagagcagccattatttgccacactccctctgtggtgcatggcaaataattatttgcatcctctgcggtgctcagagagctaggcacttaaacccgtggaatttaccgagcgcgttaagggagggagtggtggcatctgctggggtccagtccttttcatctgggtgatttgtgccagggcatctctggcgtcaccctggcggtggcaggggttggagactctctccagagttctgtctgcccagcactccagagctggaagagagagatgcaagctgctgagtagcagtgactcacagagtttctgcttctcctggttgcccaacagccaaaatccacatgcctgggaggcatcgttttgattgagctcagcctgaaaacaagacgggtgtaggctgcacacacagactttgtaggaagagggtgtttgggggttaatggggagaggtcagcatttggaaagctgataaaagaggctgcctggggaggacccctctaatgatgttggggaggagaggcaagaagtccaggcagccttttgaactgagaccccctgggcttgtcagcacaatgacttggctatccacaggcatctgttcatgactcctggcgccactgttcctgagcctgcagaccactgtaactcccacatagggcgtgaagtggttaaccgagcttcccagagtccaggagagaattacagctgagcctggcccagaaagtcagccacctgggtggcaccgcctggggctgtcctcttagacaccactccacagctgtttcctggagaattaactctaggattcccattagggtagaagctgagcttttacaagcagcactgagaatgtttatttctgagatcatccctggtaaaaatttatacccctgacccttccctcttgcatgaggtttcagaaagtcaaagtcagcagctctgttgttttagggatttgaggaataagaacaatttcagccaaacagtcctacacgtgtttatttattcacatttataaggtcctctttcttccccaacgtatgtagtgtgtacccagcaatgattctgcaggcagttgttatgatcctcattttactgatgagggctcaagagtttagatgacttacccaaggtaaaacaatcctggggcacagagccagatgctcaggctccaagttttgtgccttttgatcacaccgtgctaaagtatagttacagcagcactggcttgtttacttaacggttttctgagctccccaaactatatgctccattggaagagagactttgtgcatttcgctcactgctgcatcccaatcaatgtagagaacggtgcctggcacgtaagacagactcaacaggagagtcacataggacttttatttatttatttatttatttattttttgagacagagtcttactctgtcactcaggatggagtgcagtggcacggtcttggctgactacaacctctgcctcccggcttcaagcgattctcctgtctcagcctcctgagtacctgggactacaggcacatgacaccatgcctgggtttttttatttttttaatttttttatttttagtagtgacagggtttcaccatgttggccaggctggtcttgaactcctgaccttaggtgatctgcccccctcatcctctcaaagtgctgggattacaggcgtgagctactgcgcctggctagagaccttatgggctttgattttcttccctttgaagtagggaagtatctgttcatttactgagctaattgagtagaagcaaatttgcaaactctaaatggctgcatgagagtgtgccatagtgatggttctctttccacagcccccttctattctctagtattggatccttaattcagcctcccttctccctttttcccagtctccgagagtggacagaatgagcaaggggacacttaagagtgggtcatgttgcttcttgatagctgctgtgataagtgtcttaaatggaaacagacaccccgaggggagcctgcgaatctctgagctccttcttccactctgcccaatgaccgaaagctgactctgcagcgtacaatcagaggaaataagagagaacagggaactcacatatacatgaaaaatgctgctggtccttttgtgaagcgatggcagcacagaggtgaatgagatggttctgcacaggctggctggctcaggagagtccttagtgatcagaagggggcttctgggccaatgggtgaactctgctctaatgcacggctccaaacgacaccctttgaattgggctttcttaccttcctaatctcagttgcctctgtctttcatcactactgggagtcgctcgtctgctcacaatattctattttcctcctaaaaaatgttatagtctagggaggtccaagtagcagatactcctttgagcaaatagtccttatatgtttgtgtaaggagcaggcatattgccctatagccacaattcaaatgtgtataggttccagcatggtactttgcatatattaaacactgaaatttttaaaatcaataattaaagaaattgctaaacacctaatctctgagagtgatacatccaatgtcaattctgataactttatttttcattgtaaaatattccaaaaatatggaaaagcacagaaaaataattaacactgtatctccaacaaccagatttgaacaaatgtaaaatttttgccaaattgtttcagatttgtataaagaaataacatcttggtagatatagcatccataagaaaatgaggctgggccgacatggtggctcatgcctgtaatcccagcactttgggagatcgaagaggcaggagaatcacttgagcctaggagttaggaatcagcctgggcaacatggtgaggccgtttctatgaaaaataaaataaaatgaaaattaaaaaataagaaagagatctagaaatttagtaatatctttttgaaaaaatattcatgcatcatttaataaaactttaaatgtcaaaaactaagctgaaatgttagagatagtacagtgaatatgagagattttccctgttttctgccttctaggagcattaactaggtagaaaatcacagagaagagttttagcagcagttggtaacaaaaactccaaaatcctgattttttccgcctagcaccattttttctttctgcttgctcaaaacttgagacaagtgccggtgtggcaggtctgatgctgagcctgagctccgcgttcttttttaggagtgctcgccctacgcagcccacctctacgacgccgaaaacacccagacgcctctccggaatctcccgggcctctgctctgattactgctctgccttccattctaactgtcactcagccatttccctgctgaccaatgaccgcggcctccaggagtctcatggaagggacggtacccgcttctgccacctcctggaccttcctgacaaggactattgcttccctaatgtcctgaggaacgactatctcaaccgccacctgggcatggtggcccaagatcctcagggctgcctgcagctctgcctgagcgaggtggccaacgggctgaggaaccccgtctccatggtccatgctggggacggcacccatcgcttctttgttgccgagcaggtaggagtggtgtgggtctacctccctgatgggagtcgcctggagcaacccttcctggacctcaagaacatcgtgttgaccaccccatggatcggggatgagagaggcttcttggggttggcttttcaccccaaattccgccacaatcgcaagttctatatttattattcgtgcctggacaagaagaaggtagaaaagatccgaattagtgagatgaaggtttctcgggctgatcctaacaaagctgacctgaaatcagagaggtgagaggtactcatgagagcctacagctgtactgtgttccgaaataatgccaaccaggtctgcgagataatagaggggaacttcactggttttagagcactactcgaactgttgagaaaggagtcactgtggattgagaacggcccaagttagcctcttgagttaaggctgtttaatgggatgtagccatcaccttacagttaccctaaataaagacatactttcctgtctttacaaagggtaagtaaggaccagcagccataggggtctgagaaaggattatagataatatcaacatatgaaacataatagtagcctctgattattatgtgccattagatcccagggcctttactttgaatgtgggatttcttattctcactggaagctgtggcacaaggccatcaagctatggatgcatggccaggtgaggactcagttttaactgaccccaagttcatgctctttccaccctaccactctgcctttgtttttccttcttctcctttctctcttgtttcttttcccgtggtagacaggttggaggattgcaaagagcataaagaactgatagattaacccctcttaagttactcaaaagaagggatggagcattctggtagggcagagagtaagggcaagccctggaaaaggatggttgttaccctggctgggtccacagctcattaaatcatggtatgaaagaaaaatgaggccaggcatggtggctcatgcctgtaatcccaacagtttgggaagctgaggcgggcggatcacttgaggtcaggagttcaagaccagcctggccaatatggaaaaaccctgtctctatcaaaaattagccaggcatggtggcacatgcctgtagtcccagctactcaggaggccgaggcaggagaatcgcatgaacctgggaggcagaagttgcagtgagccaagatcacgccactgcatgccaacctgggtgacagagcaagactccatctcaaaaaaaaaaaaaaaaaaaagccagatgtggtggggtggtaatcccagctactcgggaggctctcagctgaggcaggagaattgcttgaacctggaggtggaggttgcagtgaggtgagattgcaccacagcactccagcttggatgcagagtgagactctgtctaaaaaaaaaagacaaaggaaaatgagccatgaaagagttataccaggaaacaaggggcatctcagagccccaaagctacttgctttgtgatccttaaaaactcagaagcaggtcttggctggcttggcaaatctcggtggcttggcccagtcatttctgggtatctcaagaggatgcagcttcagcttgtgtcaaatcctaacgtgtggtttcttttttctcttccagggtcatcttggagattgaagaaccagcctcaaaccataatggcggacaacttctttttggcctggatggctatatgtacatattcactggggacgggggacaggctggagatccctttggcctgtttggaaatgctcagaacaagtaagctggatgggggccgggcccttgtcccttcagagtgagcccctggtgtggtgtttttgcagggatggcatcaaactcaaatcacacactgcaagatgtagtctactccactgaggcaatgggaggaacatttggttttctgttccataaatttcagacatagtatattttggtagttaatattattgatgctcaatacaactgtcagagtgttatgtaaaggagaattcaggattttaaaaatatatatattagcaggtcattattcaccacactaatcatctaattcaattcaactcaataatattattgaacaccatgttccaggtgctgtgctaggccctggagacacatgagaagttaactactgagagccaatgtgtattgggtgcttgcagcttgtcaggcattggtctaagtactttacatttgagaaggtaattttagcaaccttcaagggcaagaatttatatctaatatctattttgttaattgatatatcaccagcactcaggacagtgcctggcacaagggagtctttccataattacacatggaatgaatgaatcctatgaagtatacatataatagtatccattttacagacaagaaaatggagacacagaggtcgtacaatgagtaagtggaaaaaacagaatcccaacccacacaatacggtgccagagcccagtgatgctgtcttgcctagataaaggtcatgtggtccttctgccctttgcacccagtaagcacttggcttctattattcctagtaataaaaatattgaggttaataataatacaaagctaacatttgtcgaatacctactgtgattcaagaattgcattaaacgctatatacacagtaactcatttaacccttacatcacaaccacaccgcaaggtaaataatatgtatctagctatatattttaaatagagatggggcctcactgtattgcctaggctgttcttgaactcatggcctcaagctatccgcccacctcagcctcccaaaatgtgggattacaggcatgagccactgcacctggccaatatattaaaaagaatagcagcctctgattatcatgtgttcattagatcccagaccctttacttgagcgtgaaatttcttatcctcacaggaagcagtggcacaaggccatcagttactctcctctgactttcaaatgaggaaagtcagccccagagaccacagtcattggcagagcctctcagaagcttctattctgttcttttaactgaccacgttgttaaataaacaataaacaatataactagcttcttgaaaaactttgtcatattagaccaaatcagagagaagctgtgctcatcattaaaataagaattgaagctgcaacttgctcagggtcacatggaccaagatcacatcaaacttttgcctcgtagttctcttagagccaaacatggggcagtcttaaatatcttgtatagatttaaaagaaaatcttcaagctcatacttgcgggtacaaaaaaagaaggaaaataagaagtcaaatcttcccatgggatccttagcagtctcttggcatcagctatgagtcggcccttctgggcgatctcttccagtcctgtggctttccttgcttacctcattctgcttcttggccttctttctttcagaagttccctgctgggaaaagttttaaggatcgatgtgaacagggcaggctcacatggcaagcggtaccgagtcccctcggacaatccatttgtttctgagccaggggcccaccccgccatctatgcctatgggatcaggaacatgtggcgttgtgctgtggaccgaggggaccccatcacgcgccagggccgaggccggatattctgtggggacgtgggccagaacaggtttgaagaggttgacctcattttgaaaggtggaaactatggctggagagcaaaggaagggtttgcatgttatgacaaaaaactttgtcacaatgcctctttgggtaagtaagaagctctctgggtgatttcttggatgagttgagtgggctggaggtggaggtagggaataaaacctgaatgtcctgccctgcaggtcatttaaatcacgccttgtttgtgtcctgtggtgtagtgcttctccaaccggtcctccagccactcactggcaccagagacatcttggcagtggctattttaaaaaagtgaattcctagactctgccctcgacctaatgaatttgaattttgggtggattggagacatgagattgacccaggaatctgtattttaaataagttacccacattaattttaggcatattattttgagaaccactggcagaccaaaattgatgtatgtttttatttatttcccaactgggacaggccactgaaatgatattctgcacataggcaagtaagaggacactttcttttctttttttttcttttctttctttcttttttttttttttttttttttagacagagtcttgctctgtcactgggctggagtgcagtggcatgatctcagctcactgcaacctccgactcccgggttcaagtgattctcctgtctcagccccctgagtagctgggattacaggcatgcaccaccactcctacctaatttttttatttttagtagagatggggtttcaccatgttggccaggatggtctcgatctcctgacctcgtgatccgcctgcctcggcctcccaaagtgctgggattacaggtgtgagtcaccgtgcccggcccaggacactttctaaacaccaataatcaaggtgtactttagaaactccacctggctcaaaattctagtgttctgactctattacttcttcttagtcttttcttgtcctctaacttataaagcagtcttacagactgtgacaatattttccatatccttaaacctgggtttctgccatatcaacctagggggaaaacttagccatgtggatttccaggtcactgcctcatagatggagggaatttttggcttcctctctgcctgcagatagcagttaagtaggaagtttgcaaatattgtggatggcctattgagaacaataaacatgattcacttgcttgcctgtcctactgaagaccaagaggtaaagtgttctttactgaattaggcaactgcattaaaaagtccccttcttcctccttgaagctttcaattttaggccacgacactcactctctttcctctctcctggacagatgatgttctgccaatctatgcttatggccatgcagtggggaagtcagtcactggaggttatgtctatcgtggttgtgaatccccaaatctcaatggcctgtatatctttggagacttcatgagtgggtaaggaaggactgatgtcccttctccctctttttattttaatatttttactgaggtataacttacatatggtgaaatataatcacgtaagagcacaggtgtttgatgttttacaaatgtatgcactcatattaccaccaaccatatcaagaggcagaacacttccatcaccctagaaggctccttcttgtctattacctctctctctctctctctctctctctgtctctctctcataccaggggctcactttaaagggacaggggcccagcttccatccagcttacttgttctgagcatttccaaacatgccaaagggatcgggtctccagcctgtcccccgtccccagtgaatatgtacatgtagccatccaggccaaaaagaagttgacatacatacacacacacacacacacacacacacacacacacacacacacacacacacacaccccagccagagataagcactctcaccacagcttagttttgcttctggaacttcatatataaatggaataattataatatgtactcttctttttgtgcttggcttctttaatttggtaatgtctgtgggattcatcaatgttgttccatgtatcagtaatttgtcttttttattgctttgtaaaattcagttgtatgagtacaccacaatttattcatctgttctccgtgttgctgatggacattttggctattcccagttatgaaatattgtgaataacatggctactgtattttatagtcttcagtgtagagatcttgcatatttacctgtctcttagtgtttgatgttatagtaaatgttattttgttaaattccagtttctgactgttaattgttagaatatagaatttttttatattgagcttatatctggcaaccttgctgaactctttgttcattctgatagcttttttgtagattctactggattttctatgtggaacataattttattagaaggtctgtgaatagagacacttttactttctttttttttttttttgagatggagtctcgctctgtcggccaggctggagtgcagtggtgcgatctcggctcactgcaagctccacctcccggggttcacgccattctcctgcctcagcctcctgagtagctgggactacaggcgcctgccaccacgcccagctaattttttgtatttactttctttttttttttgaattgaagcctgctcttattttttaactggcttattgctctacgttaatctcagtgcagtgttgaatagaaataggggaaagcattcattttcaccatcatattggtatgatgtcagctgtaggtgatttctatacaccctttatcaggctggggacattttcttttatttctagtcctttgaaaatttgtattagatatagatgttgggttttgtcaaatgcttcttttcatcttttgatgaatcatgtgggcttttaaaatttttagtttcttaatatggtgaatttcattgattgatttaaaaattgctagagcagtcttgcattctgaggaaaataccacttggtcataatgccttatcttatttatttatttattttttgaaacaaggttttgctctgttatgcaagctggactgcaatggcacgatcatagctcactacagcctcaaactcctgggctcaagtgatcctcccacctcagcctccccagtagcttgtggcacccagctaattaaaaaaaatttttttttttgtagagatggagtcttactatgttgcctaggctggtcttgaactcctggcttcaagctgttctcccaccttggcctcccaaagtgctaggattacaggcatgactcactgcccggccccatcctttttacatatagatggatttgatttgctgacatgttgtttgaaattttaaaatctatgtgcatgaaggaatagtgaactatagtttttctttcttgtaatatatttgtcagatttggaatcagggtaaacaggctttacagaataagtactcctgttcaattatctggaagagtttgtgtaaaataggtattatttttccttatgtgttcttccttccaagaaaaaccatctgggcctgaagttttctatgtgaaaagacttttaattacaaatttaatttctttattagatttaattactcagcttatctatttctttctgagtgagctttggtagtctgtgcctttcaaggaatttttccagtttgtctacgttgtcaaatgttttggcattcagttgttcataatattcctttattattcttttaatatctatagaaactatggtgatgtcacttgtcttattctagatacagttggtagttgtgtcttctcttttttttaaatcagtctggttagaggtttatccattttattgatcttctataagaaccagcttttgtgttcattgatttttttcctgttattttaatgtttttttctatttcattgatttcttctcttttttcttccttctgcttgatttggatttaatttgctcttctatttctagtttctcaagatggaagctgagattattgatctgagacctttcatcttttctaatatatgtgtttagtgctataaatttccccccgagtactactttagcagtatcctgtaaatgttgatatattgtgttttcattgttattcagttaaaaatattttctaatttaccttttgatttctttgtcccatgagttatttcaaagtgtgctattaagtttccaattacctgaagattttccagagatctttctgctattgatttctattttagatttactgtggtcccagaacatattgtatatgacttgggggactatcttggattttctgggtgggtcctaaatgaaatcacaagtgtgtttagaagaggaaggtagggggaaatttgaagatgggagagatagaaggtgatgcaacaacgatggcagagggagaaaaggtgacgtgatgtggggccatgagtcaaggcatagggacgaccttcagaagctggaaagagtgagggaaccgattctcctccagagcgtctggagggagcacagtcctgccaacaccttgatcttggcttagtgaagaccacttcagagttctggcaaccaaaactataaaagaataagtgtatgttgttttaagccacaaagttgtcgtaatttgtagttgaggtgatttgttacagtggcaataagaatgttatcattcctaatgctctcaattcctttgggtagatgcatgtttctatctgatatcatttttcttctgtctgaagaacttcctttaacatttcttgtcaatggggtctatagtgatgaattgttttcacttttggagtctttattttgccttcatttttgaaagatattttcactaggtatagaagtctatgttaacatgtttttttctttgattctttagaggctgcgccactattttctggcttgcaccattccaatgagaaatccgctgccagacttctgtttgttccttcatatgtaatatatcattttttttcctatggctgctttttaagattttctctttatcattagttttgtgcaatttcattaaaatatgccttagtttggttttcttcatatttctgtgcttagagttttttgcagttattggatctgtgaatttatagctttcaagaaatatggaacatttttggccattatatcttcaaatgtgttttcctctgtccccactccttctctccttttattcagaggctctaattacatgtatattgggctgcttaaagttgttccatagttcgctgatgatctatttatgttaaaaaattttctctgtgttttattttgggtagtttccattgctatgtctttagttcatgaattgtttcttttgtaatgtctagccagccattcattccattgagtgtgtgtgtgtgtgtgtgtgtgtaatctcaatgtatttttcacctctagaaacttgatttgggtctgctctgtatctctcatatctctctgtaatttttttttttttttttttttagagatggagtctcgctctgtcgcccaggctggagtgcagtggcacgatctcggctcactgcaagctccgcctcccgggttcacgcccttctcctgcctcagcctcctgagtagctgggactacaggcatccgccaccacgcccagctaatttttgtatttttagtagagacggggtttagaatcattgtttaaatgttcttgtctgctaattttaacatcttcatcagttctgtgtcactttcaatggacagattttactctttattatgggttgtattctcctccttctttacttgcctcacaatttttgattggatgccagaaatattaatttaacttagtaggtgctggatatttttgtattcctataaatgattttgaattttgcttggagacatagttaagttacttggaagtagtgtgattctttcaggtcttgctattaatatttgctaaacagatccaaggtagtgctttttctagtgctttctattcctcactactgaattctacctataccctgtggtacttatgctattcctgatctcaagtaaatgccaagtactttttcttctaattctttcctttgttttaaagtattttctcacatgtatctgctgttgagtatactgatgattacttcaggggaaccttttgcagctctctggcattctttctctgtgcaattttcttctcttcagtatctgtcctgcaatctcttactgcattggtcttcctggactctcagcaatatcttttcagctcaaggagcctgctgggctttgcctgtattttccctccctgtgctggaaactctcaaggtagtatgctggaaaaatcatagggttcaccttgtttgtttcctgtctgtcagagaacacactcctccattgcctgatcttcagtatatttcaagccattattattctatcttgtgcaggttttggaatgtttaagatgggaaagtaaatctggtccctgttagaaaagatgttctattttcatgctgcaattcttagttacagagatggggtaaagttactaattggtcaggtcctttatcatcacttactagagctttgggatttcattgttcttcatgtttttctccctacaacctccactcaccaccctgcccccatacacacatcatttggttaatatgcagtgattctttttccttttcttttctttttttcttttttttttttgagacagagtctccctctgtcacccaggctggagtgcagtggtgcaatctcggctcaccgcaacctctgcctcctgggtttaagcaattctcatgcctcagcctcccaagcagctggaactacaggcacacaacaccacgcccagctaatttttgtattttcggtagagatggggttttgccatgttggtcaggctggtctcgaacccctggcctcaggtgatccacccgcctcagcctcccaaagtgttgggattacaggcataagccactgcacccattcacaggcagtgattcttaattgaggtgtacttatcaaaatcccctgggtttaggatctctgtttccataaaactttccaggtgattctgatgagcacccagggtctaaccaacttcctttcccttttcttctaaaaacctgcttttagttcagatagatgatagagggataggaagcatctttctgctactgtataaatatacagcaataataataacagttagtagtttttttaacccttactatgtgccacacacattggtgagatctttatgtatattattttgtttaaccttcaaaattctcacctatggtaaagtatgttatcactccccattttatggatgaggaatctgaagcttagagatattgggcaactacccaaaggtcacacaactaatgaaaataagatcagtcttttgtagtggtgcagcctacacagcacgtcaaactcttttttttttttttgagacaaagtcttgctctgtcacccaggctggagtgtgcagtggcatgatcttggctcactgcaacctccacgtcctgggttcaagcatttcttgtgcctcagcctcccgagtagctgggactataggtgtgcaccaccctgcctggctaatttttgtatttttagtagagatgggggtttcaccatgttggccaggctggtcgtgaactcctgacctcaagtgatctgcctgccttgtcctccaaagtgctgggattacaggtgtgagccactgggcctcgtccaaactccttttatatagaacatgaacttccacatctagggcaagtgggtgattgaaatatctctgaagaagctttttggttgcttggaggcaggctagttattgatctcttaatgggggactcagtcctagtactcagggatctctgattctaggagaaaaagtattctgcagagtggatatatggattcctaaacataagggtttattttttgtctagtcgacttatggctttgcaggaagatagaaaaaacaagaaatggaagaagcaggatctttgcctgggcagcaccacgtcctgtgccttcccagggctgatcagcacccatagcaagttcatcatctcctttgctgaagatgaagcaggtaacaaatgtacagagttgtttgatttctgcttactagaactcggataatcacaggcatcaactgaacgtttattttaaatagtaattatcacttctactatgatcactatcgtttagtcatcttttataatgtactggatactattctaagcacttcacattttttaccttatttcataatcataacacccccacgatataattattttttattttttcttcttttttttgagacagagtcttgctctctgtctgcggcgccatctcggcttactgcaacctccgcttccagagtccaagcaattctcctgcctcagcctcccaagtagctgggactacaggcgcccgccaccatgcccagctaacgtttgtatttttagtagagacggggttttgccgtgttggccgtgctggtctcaaattcctgacctcaggtgatctgcccgcctcagcctcccaaagtgctgagattacaggcgtgagccaccgcgcccggctccatgatgtaattataatgctcgtttcaccaatgaagaaacagactgaatatgccaacttactccttcctgattgaaccacacaactcactgtgaggggaatatctattctgaaccacagttttaggaatgtggaaagggccaacagcgggccagactaaatgggcagcgggtgtttatgctgccggtgctgtctgggaaagggacctctggtgatcatctcactggttgggccaggttctttcctgaccttgccaagagtctgtgagaaaaggagaattttatttatttatttagaaacctgagaaaaaggtagacatctaggtaggaggttgctcagtagacagactaggcacgtgttaagggaatcagtgaagcatgatgtgcacgtgtacacatgagcgagagagacacagagagactcagctctaatacatttccaaacattttatcatcagaaagccgatttttaacttcagctttacataagttatgtttcactctgaaagataaggttttcgaattttaaatatttctctttttttatgtgaggacagtgaacttttcagtatttggcacgagatatcaccatgtttaaagacagagataataaggtgatctctcagggtcccttccacatctagattctctataggtgaaaaaaaaataattaaacaacagaaaacaaaacaaatcaaaaaacacaaaaaatacacaagaaaagaaaaaatttaaaaaaaaagattctctataggtataaaccagagtctcaaaggattctgaagtatttggtttctttcccctctgggccatgaggtggctgccttgggaccttcacttgagtaggatataaagagacccagtcagctcccggaccctttcctctcagctagccgatgaacagatagtttgagatgaatgttttataggagcagaggaaacttcaagaattttggaaacttcaagtattttaacaggaaaaagtctatgtgagttccaaattggaagtccaaacatatgaaaaaggagagaaaccacaggctggcaggatgatggccagtggaaagtgagtgacgtgaaagctgcaggcggtggtggagcctctcctctgccggacacccctgtgtccagcaccaccccagagattggaaccccagaggcaggcctgcccagggattctgggctgccatcttctgtggcttgctcctcttcaggaggccacagagaacctggctttggtggcttggtttgttgtgcttgcagacttctcaccgtagaaaacagacagcataaaaaaaaaacaacagtcatggtacatctggcaaacaaaacacagtccttggctgaatttcatggggtagacttgccaacgtgttcccaagcctttacccaagggcggccctgaggctgatgaggctgttcttgaggcaaattatttttttttccagagttgcttgctcttgtgtttttgcataaactgattcatattttctgcccttgccatattcttttcctctgagaggcatttttagatctgagccttatttcattattttattatcagtccactggctttaggtaagtcactttttacttggaacttgagctctgcctcacctatggctgcacttcacatcctgggtcctgagagttgatagctggtatgaattgctgctgagtgactggctggtgtggagctgcccattgctgaggtttaattgatgggatttctgaaagttagtcactgaagggcattcccaagagggctggtcaaatgaattctgtttgcagtaaatttgtatagcatgcatttttgttttaaatggcatattatagtttttttgtttttctcccctaagatgtatattaaaaatatcagttggatgctacagatgaaattcacttctagcattgttttctcctaaaaatacaatgggaagtctatggaatgtggaagacatgtaatttacacaaactgcagtccagtataggcatggttttcaattttctttttagactgagaaggcctttgcatggtttcgaggggcccctgcctgtgtacacgtggacctttcgtagacaccacatttatctaatggtagaatcactctggatggtgcctgggcttcccattcagacaaagcaaactgactctaaaggagggtgtgccctagttcatcagatctcttacatggggaagattatacatctagtttgtcagtacacaaatcatagtttgttaggcagctgctaccctgtgtaggggctatgcaaagaccatgaggctcacacttagcacaagacaaacgctggtctctgttctccacaaaaagcagttgtttagagctgttgtgtggtggctcatgcctgtaatcctactgctttgggaggctgagctgggaggattgcttgagtgcaggagtttgagaccagcctgagcaacatagggaaaccccgtctctacaaaaagtttaaaaaatgatcctgatgtggtggcatgcacctgtagtcccagctgctcaaaagactgaggtggaaggtttgcttgagcccaggaggttgaggctacagtgagctgtgattgtgcagctacactccagtcagcaacagagcaagaccttgtctaaaaaaaaaaaaaaaaaaaaattagttgtttaaataattcagagctgtataaagctttaggtttttcagaattgcaacttaatagacattttctttcataaaattgagaaagaattgtgtaaggcacatgacagcaagtgagtttaattcagtgtaatggcacaaacattgggtcagacagataagaaagtaaaaataactacgattatcgaacactttctttttttttttgagacggagtctcgctctgttgcctactgcactgggagtgtagtgatgcggtcttggctcactgcaacctctgcctcccagattcaagtgattctcatgtctcagcctcccgcatagctgggatcacaggcgtgtgccaccacgcctggataatttttgtatttttagtagagagggggttttgccatgttggccaggctcatcttgaactccttacctcaggtgatccacctgcctcagcctcccaaagtgttgggattataggcatgagctaccgcgcccggcctggttatctaacactttctaattgaatacctaacaatcacttgaggcattgtgatccccattttacaaatgaataaatatctcgagggctgtgcaggtgaagaggtctcccaagatagcatggagaggaactggtgttatcagaaatcaaatcagacttctgggactctccactggggctcatgaccccatagcataatgtccctcacaaataactagaaagcaatgtggaatgaggtagttactgtgacaaaagaacatttccctgagttacaactgggagaaatggtaaggagcagggggctctttctaagagtgtattagtccgttttcacactgctgataaagacatacctgagactgagactgggtaatttataaagaaaaagaggcttagtggactcacagttccacatggctgggaaggcttcacaatcatggtggaaggtgaaaggcacctcttacatggtggcagacaagagagaaaatgagagccaagaaaaagggatttcctcttataaaactatataaaaccatcggagctcatgagacttattcactaccaggagaacagtatgggggaagctgcccccatgattcaattatctcccattgggtcactcccacaacatgtgggaattatgggagccaaatcattcaagatgagatttgggtggggacacagccaaaccatatcagagagatacaggagagagtgggtagaggtgatttttgtggggcatggaaaagaccgagaggagaaatggagagtggggagggtcaccaggaaataaggaactcaaggacagaatgaaagaggaaaatgggagtgaggctgaagggaaacaaaaggactaaagaaggggcaaaataaagcgattgacagatggtcctcagcctgcagactgtatatatccaagtgttcacagaggaaagaggtggggaaggaaatggagattcacggaggtgaagtttctgagggcaaggaggtgataagggggaaacctgtttggtttgataaacaaacatacacgtgaaattgcctctgctaggccatacactgagctagtctttggggggttcaaagatggactttctcctcaaggagctcacagcccagcagagctgatgccagttaggtttctgggattccgttcttggcgctcactgcattttagggccataacctctttttgaccattttctgtgcatccaactctgtgtctcagtgctgcctgatgtcccattattgcctgtctatttttgttgccttaggggagctgtatttcctggcgacctcttacccaagtgcctatgcaccacgtggatctatttacaagtttgttgacccctcaaggtgagatttgatgtcattttcttctcaaatgcatttttctcatttcttatctccatggcaggccataaaaacagtcctcattgtcccgaagcaaactcatgttctagatgaaaagcagtttggacaaataatggcataggacaatgcatctatagcaattatggaatacttgggaaacggtctctttgcagttggacatgaagaccttgagcctttctagggttagtctaggtctgtggctttttttttttttttttttttttgagatggagtttcactcttgttgcccaggctggagtgcaatggtgccatcttgtctcaccgcgacctccgcctcccaggttcaagcgatattcctgcctcagcctcccaagtagctgagattacaggcatgcaccaccatagctagctaattttgtatttttagtagagatggggtttctccatgttggtcaggctggtcttgaactcccgacctcaggtgattcacctgcctcggtctcccaaagtgctgggattacaggcgtaagccaccatgcccagcctttttttttttttttaatatgcttctggaaatgtctgtctgaggtcatctaacaacaggtgtacacctctgagcacctgagtaagtactgctcccctgtcccctgggcttggtgcagatctccaggtctttggcaaatacgtttaactggcaggttcctcaatagctctaccttttctggagtttagtgtttattcacttgctgggctgtatgctgtttccttctgcttctttgcctatctgtctcagaggctgaccaacctccaccagcacaggcaaaagccacaataccacttcccacttgagaggtggttgggtctgggtcaggttatctgccccagggagggtgatgcattgtatccatcctgaggagtctgggcagtgcactggatttttttttatttttattttttattttttatttaatagacacagtctcactctgtttcccaggctggactgcagtgacacgatctcggctcactgcaacctctgcctcctgggttcaagctattcatgtgcctcagcctcccaagtcgctggcattacaggcatgcaccaccacacccgactaattttcgtattttcagtagagacggggttttgccatgttgcccaggctagtctcgaactcctggcctcaagcgatccacctgcctcaacctcccaaagtgctgggattacaggtgtgtgccaccatgcaccctgccccagtgctctagatttatctaaaaattattgccaaagcaagaaaatctccccctgaattagcttacagatagacatgcagaagaaaattttcccctgaggcttatgttacccatatctggattggcattcagcagacatgaggcaaataggtccagccactggttagggcttgggggggccagctctatctgagcttgtatttggccacagggctctcagtttgtgtgttctcggaagttcctggaagaggctccgtccctgaggctgttccccggggtgatgtgtggatggtggagggtggatagccaaggggtgaatttaatactgggctgttcccactgctgggtctgcttctgtgcacttctcctgggtttaggggatggagcagactcagggtctttaaagtgcttctgatggttgacgatgccttggtggggagttctctttccattaacaggcttcctatgtgaatccatttttcttttctttggcagttttctgattcagttggcaggtaatttaactccccactttcacaagagcagctgtgagaagccacacagaaagcacccataaagcattttcacactgaagacatccttacttattcaccttttttttttaagttgacatttatggagttactcctgtgtgccaggcactgtactaagtgctgtgcatgtgggctctcatttaatgctgacagaattccaaccaggcaggttaacatcctcactctatggataaagaaactgaaggctaggtaagttaaattacttgccccaggtacagctactaagaggagcctggaataggaactcagttctctttgtggagaggtcattttaggactactccctccattcagttataattatatcgaatcatatagactttttaaagcttctataagtggaccagattctgctctggttacttattcagcttgtctttgcacgaaatgcaccaatcccagcattttgagggcacctggttaatttatgtatccttttctccctcccattttttcctcctacccttcctttaggggtagctaaatacagtggttgagaacatggacttgagcctgggcttggaatcttggctttgccactgactaactatgtggccttgggcctgtttcttagcctgtgcgagcctcagtttcccctctgtaaaatgagtataataatagtacttacttcacaggttgttaggaagactcaatgagttaatatttgcaaagtatttagaatggtgcctaagcactacgtaagtgttttttaaataaatacaattacctttttttccctcccacctggacttgggaggatggcagtgagagatagagttggagcaaggcagaggcagagaaagcaatggggacaggctgggaagttccagctctgctctctacagtggaagtactctctgtcctcaaagtcccttttatttcagaagatgcacccggggacaagcagtttaagaatgtgtgtgttactaggcagagaagctggcatcgcctgagggctgtgccttgagttcttgaagacattttctttaaagggagtcaccagcaccaccatcagaagcagcagcagaatcatcctcatcatcattttcatcatcctcatctgtgagctcttgttatgttctgggcactgttccaagccagatgggaaacattagtttttgcatttgatagatgtggagactgaggcttagcaaggttttttgcccctggttaccaggatgtgaacccgttttgactgccaccatgcccatactcctaactccttctctgcactgtctctcaagggcctgaggagccctgttctgtctgtgcccttttacctcaccttctgagctcatagcatatttcctgttacatctaccccatccccatggataagtaaaggctgaccccaattcttgcaaatatacgccctctggtaaccttgattttccggttgcatcttcagagtcttgcgtcctcatgctttctgtttgtgtttttaggcgagcacccccaggcaagtgcaaatacaagccagtgcccgtgagaaccaagagtaagcggatcccgttcagaccactcgccagtgagtccatctttgagtcttaggctcaggccttggtgtggaggctaaggcagtgccctcagcaagcaggctataattcccatggtggagtcttagttaccccctgagggaaactaagtctatacgtctcctctgcataacagaggagttatgagtgtaaggatacccatttctactgtgaccggtttcctctagttattcgttcattcattcgtttgttgattcattcatttaatcgttcatgtattcattcatttggcatcattcatttcatacttactttgtggcaggaactatgctaatccctagggatacagcaatgaacacttaaagcctatgacatgtaggagttcagagttaaataggagtggggatgggaagtgcaggcaaataaagaaataaatgtagcactaatgttctggtatagaaggatgctcagggcacttagagggcccctagaatgaggaatgtttccttggggcagggtggggagtcaggaaagacttacagaggaaggatactatcttaaggaaactattacagaaccatgtatcactggagtgacccttctaaaaaagtcatatatttagaccaaggccagttagagaattaaaagtattaataagaataatttatattaaagaactataatgcagttatagttttctcttatagctactttctgggacttatatttttcactaaataaatactgatttctcagagacagtcttggacttgctaaaggaacaatcagagaaagctgctagaaaatcttccagtgcaaccttagcttctggcccagcccagggtttgtctgagaaaggctcctccaagaagctggcttctcctacaagcagcaagaatacattgcgagggcctggtacaaagaagaaagccagagtggggccccacgtccgccagggcaagaggaggaagagcctgaaaagccacagtggcaggatgaggccatcagcagagcagaagcgagctggcagaagtctcccttgacctattggtcaaggtggccgacagggtgacgtgagagaggagagccacctcatcaaatgaaagtcactgctgaataaagaccttagaagtctgggaagccagggtagaggtggggcagggcggttttcctctccctgggaaatcttgctgtctactgaataaataaatgcaccttctctgtatgcagtgcttctgtgggagaccatatcccagattgctggtgcacctgggttatggtaagcactagtccatgagcctgcttggaatcacactggatgtctccgttttgtcttgtaaatgcctacaacctgaggtaataaatcaacatttgctcaaactggcaca

SEQ ID NO: 341 - DNA, 2545 bp, Homo Sapiens
cagcccgagtgttcccaaggccaaaatgctgagaacgtccactcctaatctgtgtggtggtctgcattgccgggccccctggctctcttctggcattctctgcctctgcctcatattcttgttgggccaggtgggcttgctgcagggacacccccagtgcctggattacgggccccctttccagccccctctgcaccttgagttttgctctgactatgagtccttcggctgctgtgatcagcacaaggaccgccgcatcgctgcccggtactgggacatcatggaatattttgatctgaagagacatgagctgtgtggagattacattaaagacatcctttgccaggagtgctcgccctacgcagcccacctctacgacgccgaaaacacccagacgcctctccggaatctcccgggcctctgctctgattactgctctgccttccattctaactgtcactcagccatttccctgctgaccaatgaccgcggcctccaggagtctcatggaagggacggtacccgcttctgccacctcctggaccttcctgacaaggactattgcttccctaatgtcctgaggaacgactatctcaaccgccacctgggcatggtggcccaagatcctcagggctgcctgcagctctgcctgagcgaggtggccaacgggctgaggaaccccgtctccatggtccatgctggggacggcacccatcgcttctttgttgccgagcaggtaggagtggtgtgggtctacctccctgatgggagtcgcctggagcaacccttcctggacctcaagaacatcgtgttgaccaccccatggatcggggatgagagaggcttcttggggttggcttttcaccccaaattccgccacaatcgcaagttctatatttattattcgtgcctggacaagaagaaggtagaaaagatccgaattagtgagatgaaggtttctcgggctgatcctaacaaagctgacctgaaatcagagagggtcatcttggagattgaagaaccagcctcaaaccataatggcggacaacttctttttggcctggatggctatatgtacatattcactggggacgggggacaggctggagatccctttggcctgtttggaaatgctcagaacaaaagttccctgctgggaaaagttttaaggatcgatgtgaacagggcaggctcacatggcaagcggtaccgagtcccctcggacaatccatttgtttctgagccaggggcccaccccgccatctatgcctatgggatcaggaacatgtggcgttgtgctgtggaccgaggggaccccatcacgcgccagggccgaggccggatattctgtggggacgtgggccagaacaggtttgaagaggttgacctcattttgaaaggtggaaactatggctggagagcaaaggaagggtttgcatgttatgacaaaaaactttgtcacaatgcctctttggatgatgttctgccaatctatgcttatggccatgcagtggggaagtcagtcactggaggttatgtctatcgtggttgtgaatccccaaatctcaatggcctgtatatctttggagacttcatgagtggtcgacttatggctttgcaggaagatagaaaaaacaagaaatggaagaagcaggatctttgcctgggcagcaccacgtcctgtgccttcccagggctgatcagcacccatagcaagttcatcatctcctttgctgaagatgaagcaggggagctgtatttcctggcgacctcttacccaagtgcctatgcaccacgtggatctatttacaagtttgttgacccctcaaggcgagcacccccaggcaagtgcaaatacaagccagtgcccgtgagaaccaagagtaagcggatcccgttcagaccactcgccaagacagtcttggacttgctaaaggaacaatcagagaaagctgctagaaaatcttccagtgcaaccttagcttctggcccagcccagggtttgtctgagaaaggctcctccaagaagctggcttctcctacaagcagcaagaatacattgcgagggcctggtacaaagaagaaagccagagtggggccccacgtccgccagggcaagaggaggaagagcctgaaaagccacagtggcaggatgaggccatcagcagagcagaagcgagctggcagaagtctcccttgacctattggtcaaggtggccgacagggtgacgtgagagaggagagccacctcatcaaatgaaagtcactgctgaataaagaccttagaagtctgggaagccagggtagaggtggggcagggcggttttcctctccctgggaaatcttgctgtctactgaataaataaatgcaccttctctgtatgcagtgcttctgtgggagaccatatcccagattgctggtgcacctgggttatggtaagcactagtccatgagcctgcttggaatcacactggatgtctccgttttgtcttgtaaatgcctacaacctgaggtaataaatcaacatttgctcaaactggcaca

SEQ ID NO: 342 - protein, 724 aa, Homo Sapiens
MLRTSTPNLCGGLHCRAPWLSSGILCLCLIFLLGQVGLLQGHPQCLDYGPPFQPPLHLEFCSDYESFGCCDQHKDRRIAARYWDIMEYFDLKRHELCGDYIKDILCQECSPYAAHLYDAENTQTPLRNLPGLCSDYCSAFHSNCHSAISLLTNDRGLQESHGRDGTRFCHLLDLPDKDYCFPNVLRNDYLNRHLGMVAQDPQGCLQLCLSEVANGLRNPVSMVHAGDGTHRFFVAEQVGVVWVYLPDGSRLEQPFLDLKNIVLTTPWIGDERGFLGLAFHPKFRHNRKFYIYYSCLDKKKVEKIRISEMKVSRADPNKADLKSERVILEIEEPASNHNGGQLLFGLDGYMYIFTGDGGQAGDPFGLFGNAQNKSSLLGKVLRIDVNRAGSHGKRYRVPSDNPFVSEPGAHPAIYAYGIRNMWRCAVDRGDPITRQGRGRIFCGDVGQNRFEEVDLILKGGNYGWRAKEGFACYDKKLCHNASLDDVLPIYAYGHAVGKSVTGGYVYRGCESPNLNGLYIFGDFMSGRLMALQEDRKNKKWKKQDLCLGSTTSCAFPGLISTHSKFIISFAEDEAGELYFLATSYPSAYAPRGSIYKFVDPSRRAPPGKCKYKPVPVRTKSKRIPFRPLAKTVLDLLKEQSEKAARKSSSATLASGPAQGLSEKGSSKKLASPTSSKNTLRGPGTKKKARVGPHVRQGKRRKSLKSHSGRMRPSAEQKRAGRSLP

SEQ ID NO: 343 - DNA, 13066 bp, Mus Musculus
  misc_feature (1)...(13066): n = A,T,C or G
cgtcagcctgggattggtaacctggagttaagcgggctccctgccaacgcgagggctttaaaaggggtgatgcaacgcgctcccagccacagtctcactcagcgagacgccgcgcacggtgcttccccagtggagccaatcggctaacccgcgctccggcagagtccttggcgctcgcccgccggcgggacagaccacccgcctctggccgctctctggaccctggccgccccgagcgaagactggaggtgagttagagccacaccgaggagcgctgccctcctcaccctaagttcccctctggtgaccagtcccgggacccttgcgccaccggagactgaagccctagtgtccgtgccacagtcgctcggctgagccgctctttgccgctgccgttcttagctggtaaaaagtttctggtaaagtgaaagaacgaactttctcttttgactcgaggcgtgaaagatgcccagggacggaggagttgcgctctcagtttgcaactaggagaggtcgtctgggtggaaggtgggtgctggtgcgcggaggtgactcacactctggcgatcggggtcccctcttccatccatcacttcttgtcccggaccctggactcggagcgggtccctcctaagtccgcgtagaggcgcagtggccgcggcttgttgaagcgctgctcccggtatcgagctaaatgaatgaagaccggacgctcgaacggaggtccggcacagccgctggaggtcgccttgcgctccccggagcagagatctgggcagcatgaccgcgtagagcgctgtgagcgaaagtgtgttaggataagtttggaggcggcgagccctggtgtggcgctgtcccggggctgaaggccgagaggtctccgcaccagctaacttcggaccgctaggtttgagacgtcacttccagcctcactcgctgttgtgacttgctgtgctctggctgacttttaaccggcccttgagtttctttatgtattggaagggaagcgaaggaatcggatcaagcgggtggagggaccagggtgtggaaccannnnnnnnnnnnnnnnnnnnttccacagaggcagaacattcttggaagcctccgggggggggttgtttgtattctcgtgacagagtctcactctgtaatccagactgcccataaaaactccggccaatcctcctgcctcagcctcccaagtgctgaaattacaggcccacacgcccagcacctttctgtgcgctgtgtgcttcagatagccagcttttgacagatttgtttctagactaaaataattaaagtaaaaggagccagggagggatgttcagtgtggaggctcccccacccagcgttcctagccggtctctgagacaggacaggaaagggggcctctcttacatctctgtctcctagctctctcccgttggattgattccctgcttcgaccccatgctcattttcaactcccatttctgtattttcctcttagccattttatttgatttaatcatgtagctcacgagctttcttataaattaaaggagttgccaagcccgattatttaaaaggtttattctcccctcctgttgttccactcttttgagacaaagtctccctatgtaactggggcttgctttaaacttatggcagtcttctagcctcggtccccaagtgctgagattacaggcatgtgtcaccaagaagggagcacatgttttgcatgttgcatttgttatgggataatgttaccacatacaggctcttgcttggagcgggtggggctggggtgggggttgctgttgcttctatcaagaggtttcagaggctgctgaccaggttcccagagtgaagaaggcattgcccagcacctgtggctatctaaatcccttcttggcacaccagtttcttctggtcttcattctgtcagagcctcctctatgaggggtgccaggtatgggtctcttcagccctcagttgcccccctggcaggcagctctctctgtggttgcttatttggttgatctattgaactaactgatgggtcctcctggtagtgcagaatgagtagagggtgggtgtgggcagcttggctggactggaccacacccatctctgtgagtttagttaggcaagtgctttccttctgggacctcagtttattcaatgacaaaatgggggtttgagctagacaattctaatgctgggagtcccgttgagttcctttagccaaagtctgtgattctttaaggaactggctacaggggttccttgtcaagggaggagggacatagccaggaccccccagaaacttcaagagagaaatggtttcctatgtgagaactcacaatcttggccaatccaaccctaatggaggaatgctgatgtcagccaattgggtgtaattcacctggtgtcttaggaactcgggggtcaaccaccagttgtgacagactggcttgaaattcttgagggttccagtcaattcctgatgactagaactaaactgaactgaactagatcagggtccctgaggggcagggagaatgtgaatgtatggatcctaatttccttatgttttaaagtttgtgcatgtgatgtgttgttccccacagccctgggagggaactggtcagttcagataggaactgaaggtcagaaagcctctggctcgggagtgggtgcccaactagtgagaaccagaggcagacctggaaatgctgtctctgaccctcaagcccagcctcccgcctccagccttcaaacaggagaaaggacaggatgtagagtcaggaaggagtactggttccctagtactacaggacagtttgcagacagcttggtggaaggaagtggaaatcaaaagtgaaaattcaaagccatcataagctactaggagataaaaatctaggagctgaatttccagttaagtgagggaagtttcattttcttgaaaatggcgagattgccgatggtgcggcataatttctggttggaagtcatgaagcagcatctggaagcatatctgaaagacagctttatgatcagtgtagaaagttcactcagctcaccccaaatctcccctctttggggcctcagctcctgaaatcaagttgaaactttcaactttctttccctggaggacacagcctggctctgcctgactctctggagacctctgtgcaagacaaaccagaaaagacaagagcccaaatcttacagagtgtgcccccatgggggcttcttaacagctttctaacatgcttgtgtccccaagtaagccccacccccagctcttcacagaaacattccataccactgacattcctcagtttcttcctgactttacactaagaatgctgttgggggaagtcctatacagcggactttaacctcaaagggctcgttaataaacttaactgggctgctaaaggctcatgctcaactgctgtggctcaagctagttaagtatagatgaactagttaagtatagatgaactattcagtcctacaaatgatggccaggccagtggcagccctgaattccacccctggactgttggggtttttgtttgtttgtctgtatttccaataaaatgcaaaggagaatatataggaggatgccgagcctctggcttcagaagtcatagaaacatcccccaggtacaaggttacagcttccaattaagagaccttcagttcttactcctgtctggaaaagaattgtatacatctttttgagttcttttactgctctggaatttctgcctccaccagtgggccttaatatccagggaaagggatcttcaggaagggctcaagaaggtgaccagaccccagggagtctccgtaggagagcagccatccctctgtgggagctcctgggagacccagagtagctcctcatggcagaatgctttccagggcatttcttgtattatttcccaaattgcttccaccactcttggggaattagggtactcattaccagccttcctttacagaagagatagtacaccagggtactatcaccacacataactgagcagtcttcaaatctcagttaacaaacaaacaaacaaacaaattctggtatagggattttatggaaggctgtgagttctgaaaccacgcaaaacaaatcccagtgccccatactatcccatgttaatgtgatctgactaaatctcagtaagttcatgtctaaaatgggactagttttcacaacgctggctgcaaagctcaagggagacaaggtagatagatttctccttaaatgttagagatttgccaaaaggctcactgccctctgggacttggctgatgaccagtgtagccgaggacggtccctataccgctcctgctttgggaaaaggcccgtgggggcgatgggggcagcaagtctgcagcagaaagaggcaccagaacactcttcctagattgcttctgcccgtggttccccctgtcacccctgtgggtttgctgacctatagactgatgaggtcatctgcttcggccacctcggctgcactttatttattcagttgtttaactggccagccgggacagagcttcagcaatggtttgctcgctttctcagccaacttccacatgtagactgagtcccatagggccaaattgcctgctccttcatcctagatctttctttggccctgttccaagctttgctccttgcatgtcaaagctaaacaacacccccataaaaccagaactttgctcctggcttttgcctgctgagtgaggtcctttgctttgccagccatctcgttaagaaggggctccgtattcctgcatgacctgagttaccaccactaccgccgttccctgccagtgactggggcaaagaaacataccccacggtgtgtttaccttcttcattcggacccagtttcctccaggagaaagttctgccacagagttgttgaattcagggccccagcttccactggctaacagatgtggcccaattcaagtgtcttcccgattctttttgaaaggagactgaaaatgggatcacggcaggcgctgtactttttttttccttccttccttttgggaccgaggccacatttgtatattctgcataccggccacagaagagcctgaaatgaggacccccttgagccttattttagatgtgtctctgagctgtgtgttttaaggatctgttttactcacagtgaggatagcataacattttttttgatggtgcattgaatttaattagcattgtttgcacgggtgtggggatagttattggcacatgggcaacttaactactgaataaatgttccctttaactgtcagggttcactgctaatagctcctgggttagggttgggactgcatcttccctctacaggtcctgtgcaggtaaccagagctgctgggttcatgagagaaactgccgtgtcacatccagaaagcagcacttcccagaagtctcctaccctcctgagcttacctccttttagccccgatgttccctgagctatgaatgtgtgtgtgtgggggggtgctgtttaggatgggacatggaacagccacttattctcagcaccttgtacagttatgaatctctgcattagctgctgcctgttgcaaaaggaaactgaccaaggttgtattgctaatctgtgggccagaacataaaggaggcagttttacaacacatatgtttagcaaaacaacagtaatatgttctcctttacttcctataatttctccaggcatgggcaaggcatgggcatgggcataaagtaataagaaacctgaagcctcagggctgatgggatttgtttctgaggtaggctgtcagaccccatgccccaggacgcctgaagcagtgtgtgcttattcttttttctttcagcaaaatgatgcttcaacatccaggccaggtctctgcctcagaagtcagtgcgaccgccattgtcccctgcctctcacctcctgggtcactggtatttgaggattttgctaacctgacaccctttgtcaaggaagagctgagattcgccatccagaataaacacctctgccatcggatgtcctctgcgctggagtcagttaccgtcaacaacagacccctggagatgtcagtcaccaagtctgaggtgcgttctgcaacacatgatcctttcttcagctcatgcttgtcacacatgctccacattccagcacattcagaaggcttaaagttggggataagaaccatccaaagctctgggctctgggaggttaaagtctaaagataacagagtaaagactataatacacgaatgagcaggtatagtgtgcacccgagaatgggcagatagagtgtgtgcatgtgtgtgtgcgcatgcaggtacatgcatgtgtatgtgtctgtgcatatgtgtgtatggatgtgcatacatgtgcgtgcgtgcatgtgtgtgtgtgtgtgtgtgtgtgatatcaagaaactgaaacaggaagatcaagagagtggtgagtttgagggaaatctgaggtacatttccatactgtcttttagagagagagagagagagagagagagagagagagagcactcagcagttaatagcacttgctgctcctgcagaggacacaggttcaattcccagtacccacatggtggctcacagctatctgtaccttcaatttcaggaaatccaacatcctctgcaggcaactgcataaacatgtcacaaatacataaatgcaggtaaatactcatacatgcaaaataaaaattatgtctcttttaaaacaacaacaaaaggaagacagaagcaagcaactgcacaaactcagacacacacaggcaaaggctggtgtgcacagaagcaagcaactacacaaactcagacgcacacaggcaaaggcttatgcacatacaaataaactttattattatattttaagaaaagaaacgggttcagagattagctcgaggtgaaattttcattttagattaggagactgtggaaagcttgcctggtcatggcctactagctaagacttgaggagagggagttgtgtgggaagggttctctcattaggaagaagactgtgggctgggagtgaactgggcatgtcacacagaagctgctgtgtcaagagtagaagggaaaccactgggaggcttttggacagagaagaagctggtctgatacatttatgtggttccctggtctgatacatttatgtgatgccctgaaaaccgtattgggtaggccactggatgagtaagccagagaagtatgctcagaaatgaaactatgagaccctgcacttacacggaggaaggtctgggatatagtgctgaaggtggctggcttctggacctaggccagctgtcttaggtatggctatggtttttggaaagatgagagtatccatttgttgcaggaactgtagaaggccaggtgggacaagaacagaacttatgtccttggaagatgtcaaataggcaggcacagatgtgagctgggagtcctgggccagagatccagggctgggaagtatctgactgtggatggtgcttgaagctgtgagtttggtgaggccacagtctgtgcagaggctttctaaagaagcaaggaatatggtggcgattttcatcactcaatggatccagggaccaaggattagccctacccttcctgataacaatgctcacagatgtggtacaccatgtgtttgctctgtgctcacacatgttcacacacatgttctgtgttgagaaacctttgcataagacgcctggagtaacagacatggctactgagctgtggttgctggtagctctgttgtctcaagagcatcagaggtgaacacttgtaactttgctaggctttcttagttaggattattttaagtttacttaatgggtatgatggcaactgtggagtaaggagtgaaactggctcaaaagatgtgaatttaaaaggagcttgaggtctggggttgtaggtcagtggcggaatataagacattgcattacattggggataaaaagagattgatcaataggactgacatttgtggaagtctgaggggaacctgaatcatagcatttagtagatgggaatgaactatttatgatgctgttgctatggatgccgttaggggcattagctgtgcttcaagctagctcagaggaggtcagagagggtaccacaaaacagtcatggctatcaagtccaatactggagagttagagcctgggacattctgggagatatttttttcttctaatgaaatagtttgaaataagacacagtagtagggatagacggggaagggaggctagacaggtgggtggcctgggaagagcagttggggatctctagagggagaagagtgggtgggtgatgctcccaggcattcctgactctagggggaaggatgtatttatgaaatattctttgtccagttctgaattacagggatcagtgttttattggttgtttttggttttcaagacagggtttctctatgtagctttggctgtcctggaagtcaccctgtagaccaaactggccttgaacttatagatctgcctgtctctgcctcccaaatgctgggataaaaggcatgtgccaccactgtctggctcacaaaggccaatttaaatatcaaaaccttatttcaaaatccaaataacttttaaagtagacacaatctcaatttcccacattaccagtgtaattcctttttttacttgttctttgattttcatgattttctctttgtattatttttttttaattttatgtatgtgagtgttttgtctgcgtggatatatgtgcattgtgtgcatgcctgctgcccacagaggtcagaagaaggttttggatcccccggaactagagttacacttgagagccaccatgtgggtgctggaaaccaaaaccaagttttccataagagcagcaaatgctcttaaccactgagctatgtccctgtctgtgtccgtgtccgtatgtgtgtctgtctgtctgtgtctatatgtatgtatgcatgtgtgtgtgtgtgtctatctgtgtgtatctgtgtgtgtatgatttttgtatttcttgggacagtggccttgaggcatgaaggatagaaatttggggttagattccttgggctttgcctctgtaggttgtaaatacttccatctcagtccaccatgtcttctgattcaaaagaatggggaaaggtcaggagtgggccagtcatggcatcccaaagctggcagggtctgcactgagcatcccacggggagagttcatcccagctgtgctttacagagtccatggctggatgtgctcactgctcgtcggttcatagaccatcagggtcagggtgaacgtccacggaggaccatagccaccaaagctggacgtggctcagtcctctgagcaccccagttctggctcagaaggaggcgcagggaatcagtctgatttgttggccgaatcagcaggtggttcaggactctacccatcaatagcatccggctacgggctcattcgtaccatctgctaccactaatggtctcaagtccctcctccaggagctcactgacctcatggaaaggatgtaccaggatgctcttggtaaagacagaaataaatgttggttgtttttctggaactgtggtcacatggttgacagaagtcatgggaagaagtttgatttggctcacacagttgaggggatacagtccgttgtgcagggaagacaggcagccagggaagctccgtgcccagtggtgaaaacgtgtgcccaattgtgagagcttgtgcatggtggtgagggcttgtgcatggtggtgagagcttgtgctcagtggtaagagcttgtgctcagtggtgagggcttgtgctcaatggtgagggcttgtgctcgatggtgagagcctgtgcacatctttctagctcaagaagcaaagcttagataaaagtaggttccgagttcaacagttcccttcccttgttcaacaatccacccctgccagccatgtctcccaccccaaaggtttcacaacctccccaaacagcactgttctcaggagaatgtggctaggggacagtctggtcattcctgactccagagggaaggacaacttacaaagtcttgtgtgtatgtgtgtgtgtgtgtgtgtatgtgtgtgtattgattataattagcatcagtggttatcattttaaaattcaaattcttattccaaaatccaaatgcatttttaaggtaggctttagggttttataaaaagatttatttatatgaaacactgcagctgtctttagacacaccagacagaagagtgcatcagatttcattacagatggttgtgagccacaatgtggttgctgggaattgaactcaggacctctgaaagggcagtcagtgctcttaaccactgagccatctctccagccccaggttttaggtttttaaagcagcttttagtttactaatttccaatataattctattgtactgaacaggctttagattttgttattcattgtcaagcgtttgcatgcacatgtgtgtgaaggggattcatacagaaacttaagtcgtgaggctggagatggcttggtggttaagaacacttgctgctcttcccgaggactgaagttcccaacacgtgcagtaggtggctcacagcagcctgtaactccagctcctgaagatccatccaacactctcctctggtttctgagatcaccacgaatgcacgtggcagacatacacacagacaaatatagatatgcaaatgtacacataagggattaaaaacaagcaaacccccacagccttgatatttgggttcatggtggcttaaatgtgtgccttttggattttataggcggcccctgaagaagatgagaggaaaaggaggcggcgagaaagaaataaaattgctgctgccaagtgtcgaaacaagaaaaaggagaagacagagtgcctgcagaaagtgagtcctgcctggtccagcctgtcctaggggatggaaagccttgtgggtggggcagaaatgccagctgtaggcagaggatggagcaaagctattagcatggcagaagcggctctggagatatatgtatctacacacacacacacacacacacacacacacacacgcacatatttatatacatacatacaaacatacatacatacatacatacatatgtgtatacatatatccagggccagcaacagcttgccatgaaacctggcaccctagtttgatacccagaacccactgtggaaggaaagaactgatttctaaaagtgacctctgacctcctcatgcatgctgtgacacagactagtcagtccacaaacccccagcagtttcgagactttcgagtcacaccaacatagttaaagagactttactcaccggttttaccaaatacaacaaaactataaaaccctgctattgcctttggctctcagatttcttttccatgtctcccaacttccgaggcctctacagggttcataccaccttccacctagtttgatcatcccatctttgtggtacgatggttcctctagcaggtctctctctcagtttgaggagccccaaggttcccaggtggtcccccacctccctgctccttggctccctccattgattgtcctctcttgattgtccctcaggagtcagagaaactggagagtgtgaatgctgagctgaaggcccagattgaggagctgaagaatgagaaacagcatttgatatacatgctcaacctgcaccggcccacctgcatcgtccgggctcagaatggacggacaccggaagacgagaggaacctctttatccaacagataaaagaaggaacattgcagagctaagcagaggtggcacggaggcaattggggagttcttactgaatcctccttttccaccccacaccctgaagccattggaaaactggcttcctgtgcacttctagaatcccagcagccaagagccgttggggcaggagggcctgtggtgacctactgcattgacccactctgcccccgagtgaaccgtggagcaggcaggagcatcctttgtctcaccaattccaggatttaggccttatcatcccggccagtctcagatgacctagctggccccaggctggggtcctatgcaaagcaggatcccactaatgggattcaggcagaagtgtctaccttgataggtggggtgggaccacatcctccactgtggctgacaacgcccttccaagggaatatggaatgagaacattcattattgaggttgtccaatggccagggtatgctttctagaaaatatgctgttctgtcccagaatgactgtgcatagggtatccgtttcagagcctggtgttgtgctatttagatgtttgtcttgcacaacattggcatgatttttccgggagtttcatcagatctgatttctgagagtctggggatctgccatggtggaaagtgcccctcaaaagcatttgtgtggccacatgaactggctggcaccaggggagtgaaactggctgatgaccagctgagccactttgtgccaacagaggatggacgacacctttccctgtacccactgcagaggaagaaccctgggcacagcagctttgtccttggctacaaactgttacaacgtcacacaatgaaggcacaaagtccaactttcaaagggtgtaggactccatactcagtgacagggcaggaagagccaaagataaccacagccacagcctgtggagaccagggttggaagccaggtgcagggccaggcatctgcattgtgggatgttaatggcacttttgtcttgtagctattttgagatgtggtccagagcatttcagctgggagatctccctctggccaccaggactctggctactgttaaaatcctgatgtttctgtggaatcctcagtgtttaatcccactcaatagtatcattacagttttctgtaagagaaaatattacttatttatcccagtattcctagcctgtcaacataataaatatcggaacaaaacctggtaaa

SEQ ID NO: 344 - DNA, 1984 bp, Mus Musculus
cgtcagcctgggattggtaacctggagttaagcgggctccctgccaacgcgagggctttaaaaggggtgatgcaacgcgctcccagccacagtctcactcagcgagacgccgcgcacggtgcttccccagtggagccaatcggctaacccgcgctccggcagagtccttggcgctcgcccgccggcgggacagaccacccgcctctggccgctctctggaccctggccgccccgagcgaagactggagcaaaatgatgcttcaacatccaggccaggtctctgcctcagaagtcagtgcgaccgccattgtcccctgcctctcacctcctgggtcactggtatttgaggattttgctaacctgacaccctttgtcaaggaagagctgagattcgccatccagaataaacacctctgccatcggatgtcctctgcgctggagtcagttaccgtcaacaacagacccctggagatgtcagtcaccaagtctgaggcggcccctgaagaagatgagaggaaaaggaggcggcgagaaagaaataaaattgctgctgccaagtgtcgaaacaagaaaaaggagaagacagagtgcctgcagaaagagtcagagaaactggagagtgtgaatgctgagctgaaggcccagattgaggagctgaagaatgagaaacagcatttgatatacatgctcaacctgcaccggcccacctgcatcgtccgggctcagaatggacggacaccggaagacgagaggaacctctttatccaacagataaaagaaggaacattgcagagctaagcagaggtggcacggaggcaattggggagttcttactgaatcctccttttccaccccacaccctgaagccattggaaaactggcttcctgtgcacttctagaatcccagcagccaagagccgttggggcaggagggcctgtggtgacctactgcattgacccactctgcccccgagtgaaccgtggagcaggcaggagcatcctttgtctcaccaattccaggatttaggccttatcatcccggccagtctcagatgacctagctggccccaggctggggtcctatgcaaagcaggatcccactaatgggattcaggcagaagtgtctaccttgataggtggggtgggaccacatcctccactgtggctgacaacgcccttccaagggaatatggaatgagaacattcattattgaggttgtccaatggccagggtatgctttctagaaaatatgctgttctgtcccagaatgactgtgcatagggtatccgtttcagagcctggtgttgtgctatttagatgtttgtcttgcacaacattggcatgatttttccgggagtttcatcagatctgatttctgagagtctggggatctgccatggtggaaagtgcccctcaaaagcatttgtgtggccacatgaactggctggcaccaggggagtgaaactggctgatgaccagctgagccactttgtgccaacagaggatggacgacacctttccctgtacccactgcagaggaagaaccctgggcacagcagctttgtccttggctacaaactgttacaacgtcacacaatgaaggcacaaagtccaactttcaaagggtgtaggactccatactcagtgacagggcaggaagagccaaagataaccacagccacagcctgtggagaccagggttggaagccaggtgcagggccaggcatctgcattgtgggatgttaatggcacttttgtcttgtagctattttgagatgtggtccagagcatttcagctgggagatctccctctggccaccaggactctggctactgttaaaatcctgatgtttctgtggaatcctcagtgtttaatcccactcaatagtatcattacagttttctgtaagagaaaatattacttatttatcccagtattcctagcctgtcaacataataaatatcggaacaaaacctggtaaa

SEQ ID NO: 345 - protein, 181 aa, Mus Musculus
MMLQHPGQVSASEVSATAIVPCLSPPGSLVFEDFANLTPFVKEELRFAIQNKHLCHRMSSALESVTVNNRPLEMSVTKSEAAPEEDERKRRRRERNKIAAAKCRNKKKEKTECLQKESEKLESVNAELKAQIEELKNEKQHLIYMLNLHRPTCIVRAQNGRTPEDERNLFIQQIKEGTLQS

SEQ ID NO: 346 - DNA, 55366 bp, Homo Sapiens
gacaagaagagaaatcctcctctatataggatgctctgctgtttcctaaggattttcagcaccttgccccaaaatgtgagtcttgactttttctctggctttggggctaagtgggaaaaatgttacaggagaaaggtgtttggtcaggaagcctccagttgggggagtacccactgtggccctgctgggtgggtgccacccagaagaggggtgggaaagtgagcagttcggtgcatatggtacccaatgaagtgatctgagggatagggatcgaaaagtcctggagttagggtgctgcagaatctctaggttggattaagttttttactgacccctctgcaggttacataacacctgtgggacgacctgtggcatcccagtgaggcagcgatgccatctcggtctcatccaggatgaaaccgtggtttggggataccactagtcagtgctgtagtcaatgtagggcattgattactcataatgggaagccattggagttggttaaccccttccttctagtgtgttctcctccttgacattcctgcctgttctggggcccttgtgttttgggaatagaatgctttgtatcagcagtgtaacatggataggttaactggatatgggctggatatggggagagctggttcttcctgtgtttaaactggaataagtccagagtgaggaagtaaagaggttagagaggaaaagccctggagtgagggtcaggagatcttgtttggcagctggttctgccaagtaaaagctgtgtgaccttgggcaagtcattgtttctctttaagttttggttactcctctcatctgtaaaaacatgtgcacttggggttcttccagccccactagtcctcttctgtcctttaagtgtggatctgtggttctgttgttggcacaccagaaagggcacaagtttgagtgtctggctctgccatttgctgtgcgaccttggacaaggacaccccttctctgaaactcaattttcccatttataaaatatgggttattatgagacatcagtgaggatgaagctgagagccttttcagaggcacaatgtggatgtaaagcaacaccctgagtttggacagggcaggtggggtaaggcaggctgaggggtgatgtttggggttactggcaggttgaactgtgaccagggcatagagggggtggaggtcacggtcagctgtgccatagaaacctcctgccctgtcctgctcagttcctgttcctttcccagcagccgaggaaggggaaacagttgagaggttataaatgacgctgaaaacagctcacaaaagtgtctgagggggtcatgctgctggagcaaagcacgcgctgggaagcccatccagggtctggggacccctgaaaattgagcagcctcctggttcctattggtgcccaagaggatgcacctcctgcactgcttggcatcacttcctgggaaagtaaaacctcgtacggcgagtaatggatcacaactgaacagtgaccagagtgacctgtctcgagccatctctgagggaaagtcacagattccctagagaaagtctccaaattcctgtttattcttcacataaacagattaacctaggggtagcgattttacttaactcttcctttcatgttgcagcgaaagcgaaattggccacttctttgaagctgttctttgagccataaatataatttctcttcccgcccacagaaaggggttttctttttctttctttctctcttttttctttttttttttgaagccccaggcactgagacgttcagaggttggcaggaggtgcagctgccgtaggagcagcatgctgtccccctgctgactcatctgacattaacataattatgtttcagaagtcaaagtgattttcaaactatgagtaatgcagggtgttagagagagtgtttacacggcagtgggcatttcagcacactcaagaaaccagctgctgttaacagctgcaatgagtgaagaaataagaaaatgctctcaggaaaaacagcccttctctcttgtctctgtttctgtgcaaaggattcagatgtcatgaaaggcaggtgaacttaagagttccctgaggaccaatccagatctagcattgttatctgaatgccttgatgtctgatctttttatagggaaaaaaatgtctttatagcttattttccatttactcaactctagggaaaggtggatttaaagagcttagcaaattatttattttttataatgctaccggtgttaataattataataatagtctaaggttgtgctgctgcttctaaaataggaacaaggacaaaaatcatttcccccagttttaaagatgggggcagaagcccatggggagggggactgggaaatgtcttcttaaagctcctttgtctcattattatgggaaaagttctgagagccgtggagtgcagtgtgccaagtatttagacctcaggagagaaaaactgggctccagtcctgttccagaactgaatattggaatgggaatgcctcaatttcctcatctcataatgagaatattaataacactttctttgcctatgtcagaagaagagccttgaacttttgtagggtagggacagggtctgccgactattatagccccagtttctaacttagagcctgcacatagaaggtgctcagtaagtatttgcagaattaatgaatgagataaaagctataaacgccagagctctgctcttgtggtttgttactgcatctagcaaggtgtcattcacatggagagtggtcaataatttttttaatgtgttaagaaaaaaatcatgaactaattatacattcacttatacataagttattcataaacaaattggttattattttggggctaccaagctgaattacacacaaaaatatttctgtttacttaagaatgtctttaatgaccaacacaattttattaagcctcgtctcttgagtatatatcctttgcatgctccacatttgcatcatggaaaaaggagccccagagaaagagcacaccaaaaacatcgacctaccctgaactaaggggctcaggcgtgtttttgtggactacttgtattgagtgatctcttcctcctggacccattaataattattgttaggcttacttcaagtagtaaatttaagccagtccattcatggcaaatcaatccaaaatggccattaaggagagtcaggatctgtggtcccatcccaaatatttgaagatgatgccagaaagcaaatttagtgtgtcctcctggtgactgtcatttggtatttctgtcctaggccgattctccgatgggggtaaatacaggctagggcatttctaatgtctaaacctccactgctctctttctctcaaaattgcctgtccaacacagtcataatttcacctccccaactccgtcgttactgtaggtttattaatgtttgttggaccggcatcctaatttgggtgtgggtgactattccttaaggcatctcaagtaaaaaggctccttacttctgatcctggtttatttattttaaaaatacttgtaaatttaatattaatttaatagggtttttaagttagtagcaggttgctgaaggatctaaatgtttaacatatattctaaaataaacattggctgtttagagcccttacagaataaacttatttgaatttttcccctggcacccttttctttatttcttctactctttcttcctttcctcttttcccatctctccctccgtctttttcctccctgccttcttttctttttattatcttgtgtttcatttgtttctttgttgcttttggtaaacgtctttctaaaaagtatgtctggaaagagataagagaaactgattaaagagcctaggacgaggtagagagacttttcatcatatacactttctgacttcgaatttttaatagtggcaatactttttccccaataaaaaagttaaccagaacagagttgtacacccttcttgttttcatttttccacttttctaatgcgagcctatttcctccttactaggatgaaagacaggaatggcttccaaaggaaaatggggagaagagaaaggagacagtagacagaagctcaatgcctgtgtgtccacagtggagacgcaggggaaagagctagtgtaatagaaccagtaaatttttttttggcttttttttttcactcgaaatgtaaacatcttcccacttcattctttccacctcataagaattcttcttcttctacaacataatttttaatgattgtacaggagttccaattaatgtaatttttttaatgtagtttaccttactaatactctatgttaaacatttgggtaatatctgattcatcaatattgtaaatagtactgtaataaacattattgtagctaaatctatgttcatggcaattcttatttactttaaatatatttcctcaaaaagaatcaacatatttctcaaaaataaataaaccaaataatatatgaatcatagtctttgatatatgttgctcttgatgtaattttaatttctatagacacaaagaaattttccacatgtttgttaacaggtttattttctgtttatgaatcttctgttcagagcctttgcctgtacatctgttggaatcttaatatctgcagtgatttaaaatgttttataatatgtaaaatataccaacaaagacctccctatctattatttttttaaagtaataataattccctggcttgacatttacatttgaatgtaagttatatttatatatttttggcacagagagattttaagatttaaagcaatcgaatctgtcaatttttttttctggagaattactttttccacttagaacttttaaaattatttcatattttcttctaatagaaaacagccttttaaaggtaaaatttccatattttatgtaattacagggaaatgcacaaatcttaaatggatcattcagtaagttttgacaaatgacagatgcatatgcctagcaagatataaaactcaaagggtatgactttttcaggtgatggttgcacatatctatgaggatacgaaaaaacaatgaattgtacactttaaataagtgtgttatataaatcatatctatagacttttttaaaaaatggaaattaccatcatcccggaaagctccctcgtgttctctcccagctggtcctcactcctactctacccatataggcaaccacagattttagttttttcatcattagtttggtctgtttttgacctttatatggaatggagtcacacagcatgaactcttttgcataaggtttctttgacagcataatgtttttgaaattcatctgtgttggtgagcttcaggaatttgtgtctttgttactaaaagtaagctttcattatagtatgtctatatgacagtttatttattcctctattgatagacacctaggctgtccccagtttggtgccattatgaataatgaaactatgaacattgttgtaaatgtccttttatagacatatgctttcatttttcttggataaatacctatgggtggaattgctgggcataggatagatgtatatttcattttataagaaactaccagccttttctccaaaggtgttataccattgtacactcccaccaacaatgcatgagaattcagttgctccaaatttttgtccacatttggtgttgtcagacttttctattttagccattctgttgggtgtgcagtggtagcttattgtagtttaaatttgcattcccttgataaagttattgaacattttttcatgtgcttccggtttttctttattttattttaatgtgtatgtattttacatctaactatatctctttatccatcaaaagttattttgattatgatttgaggtaaatctctaaattaatttttttctaaataatcagttaacccagaacaatgcattaaataatacttttattattattactattattattttttgagatgggagtctcactgtgttgcccaggctggagtgcagtggtgcgatctcagcttactgcaacctccgcctcccaggttcaagcaatgctcctgcttcagcctcctgagtagctgggattacagccaccaccacgcctggctagtttttgtattttttagtagagatgaggtttcatcattttggccattttcttctggtcttgaactcctgacctcagttgatccacccaccttggcctcccaaagtgctgggattacagacgtgaaccaccgcgcccagccaatactttttttttttttttgagacggagtctggctctgtcgcccaggctggagtgcagtggtgcaatctcggcccactgcaagctccgcctcccgggttcacgccattctcctgcctcagcctcctgagtagctgggactgcaggagcccgccaccaggcccggctaattttttcgtatttttagtagagactgggtttcaccatgttagcgaggatggtctcgatttcctgacctcgtgatccgcccggctcggcctcccaaagtgctgggattacaggcgtgagccaccgcgcccggccgccaatacttttattctctgctaatttgtgatgctttatttaccataaagttctcatatgtacagtggtctcagaatatctattctatgtcttgatatgtacatttttacacttgttcttttgcaagttccatactcttatcgatacttgcttttaaaaatgatttaagagctggcaaggccccagtctcatcattccttttcatgttcaacattttctttgttgccgggcgtggtggttcacgtctgtaatctcagcactttgggaagcagaggcgggcggatcccctgaggtagggggttcgagaccagcctgaccaagatggagaaacccccatctctactaaaaatataaaattagctgggcatagtggcgcatgcctgtaatcccagctactcaggaggctgaggcagaaggatggcttgaacccgggaggcggaggttgcagtgagctgagattgcaccattgagctacagcctgagcaacaagagtgaaattcagtctcaaaaaccaaacaaaacaaaaaacattttatttgctgttcatacttaattattattttggttgaacattagaatgattttgtgaaattctgaaaagaatactattgagatttttattgaaattatattgaccattcaaattaatttgcaaagcactgacttcgttgccataaagcttagtattcaaacctgcatttcccaatagcattttataattttttcatacgggtccttcgcattctcattatagcttttccaaggcattccatagaagtttccaatgtcatcattgttgatatttgctgttgtcattttatcttttctaaaagttgtattttctaattggataatagttctatatagaaaagcaatgtagcaaatttctacatacaaatttttatacagacaatttgtatatacaaaaggtacttggcttttgtgtcttttttatatttagcagttttcttgggctctcatatcgattctaataattcttagttgaattgttcttttgaatttccgggaatgtaattatatcatgtacaagtaattgcaaatctattttctcccttccagtgtttgtgcatcttatttttataagtgccctatttcattggttagaactttcaggtcaaaatttagtaaaaatggccacaaactatatctttgttttggtcctgattttaataatattgccttagtatttcatccttaaagatgactttgactgtttgaaataaacactttttgttatgttaataaaagttcttaaatttgtaattattttttaatagggaccagctgttgaattctaatgtatttcctgcattaattgagaatcttatttggattttcttttttagcctgtggatgtaatatattatactattggattttaaagatcttaaaacataaaatctttttattttagattaaaccctccttgggttattttgatactgttatctgaatttggattttcttttctatgttcataatttagataggtttattatcttctttttttgagctgtctttttcagggttttatatcagggtcatctctgttaagtaaattagatagattttccatatttgtcaatgtttgaaattactgaaacatagtgattacgtattccttaagaattgaaagatttttttcctgtaaagttttctaggcctagacacattttttttcctggagggaaatctttcctttttttctaagttcttcagccgtgattggcatatgtaggttttatacttctaattttgataatgtatatattttcagactattcatttcatctaggttttcagatttataatttataattttgcaaagtattgtcttatatttaaaatatctcctccttatctggtgctgaacctcccctttttatttctaattttattattcatagggtttttttttcttctttagtttctctaatatttgtctactttattactttttaaaaaaagtgctcttgaattaattccgtaagttttcctatatcctaattcagttagttttggttttgcctttagtcttttctgtctactgatttcttagggattttgttgtcattgttgtttttataaacccttgggttgaatgcttttatttttcctttccttgaaaataaaaacaaataagattgtaacttcaacttttagtacaactttcatattttcatattttcttagtacaatatttcataccttttgatatattgtgctcttattttaattatcttctaactgctatgttcttatactttaatttctgttttaattttctgtccttatatttaatgattttttgttttaatttctattattaatagctagttatactgcactgtgatcaaataatcaagcttatataatttttgtttcttaaaatatctctcattttggtatattcatcacaaatgctttctcctgttctataatatcttttcattttgtttgtgttgtcttttttaacacatagtttttttctcttaatgtaatcaaatatatccctcttattttattgtttgtatgtttgtatcttatataaaatatttctgcacttgatgataatgagtgtatcttcctatatattgttttttctcaaggttgcaaagttttgcctttcacatctgtgtctttaatctttatggctgatgtgagtgagaatctaatttaacttactcccatatggataaccagttgtcccagtctcatgagttcctcccattgctttgtgaggctatttcagtcatgtacagagcttccttgtgtatataggttatttatgggcttttgttcggttccattaatctatttctattccctatgccagtactaccacaatcttttcaataagtctaaatatctaacaagacaagtcctgctaccctattttcttcttcttccaaattttcttggctcttcctggcccattcacatgaattttagaattagcttcttaagaattgtgcacacacacacacgcattttgaagatttttaatatgaaaatttcatcaaatctacaaataaatatggagatggctaatatttttatgggaatcttgcatgataccacgacaccagaggtgccaccaagatgactaacatttttatattactgagtactgtaatcaataaacatagtaattctctccatttatttaggtcttcttgtattttattcaataatactttcatagttttcttctttgaggtctttcataccttttaacaaatttatttctaggtgccatgtaatttctgttactattataaatgggattttttcaattatattttctaattagttattactattaagaatgctattgatttttgcatgttttttgtatctagcaacctttgctggacagtttttagttctaagagtatgtgaatgttcttgacttctttatgtagacaatcacattttcagcaaacgaaaacagcctctaatctttctctttttccattgttttatattacatcagttaagaacttcagtataatgctgaatagaggcttataacttatagccttctgtaatttctgactttaatgaaaatgtctctaaaatagtaccaattaatataatatttgcttgtagagttttgatgtatagcctttgtcaggtaaggaaagttgccttctatacctagtttgctaagatttttaaaaccacgaatgaatgctatattctgtcaatgccttttctgcatttcttgagatactaaaaagataaaagataaaggaaaaaggcctttctttttaatttgttaatttaataagttttcaaatcttgaattattctttcattcttgagatgaaattccacttggtcaagatattttctttaagattttgtatctacatgaaaaatgagattaagttataattttccttatttggattgtccctgtctggctttaatatctcaaaaaataagttcggaaattctcttcctttttcctcctaccctctgaaagaatttttgtcgtttaaagcagggcttatctatttcttaaaaatctggtaaatgtttgggcctgatgtctttggagatggaagaacttttgattaataatttaatttctttagtagctaaggcttagttctggttttatctgaataaattaccaaattttatttttttcttgaaaattatttatttttcctaagtttccatatttattcagatgcagttaatagtattctttatgtattttaaaatctccactgtatctatttctatccctttttattgccactttctgtttgtgtttttctcatttttattgattggttgagctcagggttgatctttttctgtaagttgtttcaaaaaactaactttgtgttttattcatcttccctaaatataatttctttcattcttctcttatattattttcttatttctagtttagatttctctattgtgcttgcctagtttcttaagttgaacactttacttatttattgtgctgtttttatttgtttattcattttgcttttactgattttttttcttaagtagaactctacttgtccttttgaccacagcaaggacctcagcactttttgattacatgtggaccctgttccccatcttatttttattccagagttaaagtttttaaagataaaaaagttattaaaaaatattcttttcttttcttttcttttttttttttttttttttttttttgaggcagagtctcgctctgtcgcccaggctggagtgcaatggtgtgatctcggctcactgcaacctccgcctcccgggttcaagtgattctcctacctcagcctcccgagtagatgggattacaggcacgtgccatcacacccggctgattttttttttgtatttttagtagagacggggtttcaccacgttggccaggatggtctccatctcttgacctcgtaatccacccgccttggcctcccaaagtaccgggattacaggcgtgagccaccgagcccggcccaaaataaaatattctttagtagttctttaagtgacagtctgtggttggtaaactctcttcatcgttggatgcctgaaattctttatttttcagggtatagaatttgagactggtatttattttccctctgcactttgaacatattacccttattatctcctagaatctattgatgtctatgagaaggctgctgtcagactaatttttattcctttgtaggtaaattcatttatctctttaacctttttttaactgacagataaaatgatatatatttatagtgttcaatgtgatttttaaagtaaaattataacatggaatgactaaatctagctaattaacgtgtacattacctcacatagttatcatttttgtgctggaaacacttagcattcactctgttaagcatttttcaagaatacaatatattgttattaactatagtcactatgtggtacagtagatctcaaacttattccttctaactgaaatcttatatcctttgaccaacatcgcttcaactcaccagccccacccccatcctacccccaccacggcctcagctctcggtaaccaccattctgctctctgcttctgtaagatcaacttttttcaattcccacatatgagtgagatcacgtagtatttgtttttccttgcctggcatatgtcatgtaacataatgtcctccagattcatccatgttgtggcaaatgacaggatttgtttcttttttcacagctgaataatatttcattgtgtacatataccacattttctctattcattcatctgttaatggccacttaggttgattccatatcttggctattctgaataatgctgcaatgaacctgaagtgcagatatctctttgacatactgttttcatttcctttgaatatattactcagtagttggattgctggatcatatggtaattctatttttaattttttgaggaacctccatactgtttttcataatggctgttccaatttatattcacaccaacagtgtgaaagggtttccttttctccacatcctcaccaacattttctatcttttctggataatagtcactctgatgtgtgaggtgatacctgttaacttatgattatctctttattcatagtgttctgcaattcagctgcaatttatcttcacttctagaaaattctcagccattatgtctttaaatattgcatcactgtcatttcctcctttctcttctttcagaatttttgttacattagagttggtatctatgagaaggctgcttgctgtcagactaatttttatccctttgtagataaattcatttaactctttaatcttttttaactgacagatgaaatgatacgtatttatagtgtacaatatgatcaatcaatcttccatgtctcttaatactttctcttctttgcctgtattctggatgtgttcctccgcaccattttccacttcactaatgccttcttcaactttatccaggcagaaattttctatctggtgcattttaaatttcaatgtttatactaatcatttctgaggttttttttagttggctcttttttctacctttaaccgggagtagaatcttgtcctgactattcactttgttggctgtcttccttagcattagatttcttcatgtattttgaaagctgagtttgcaggctcatttcaggggaaagtgatgtttgttttgtttggttttctgtctttttctccctcactcggtgctcatccctccttcttctccactattgcagtggtccactcagccctccagctccccgtcccagaaccagagtctctgggggcatttcagggttactgttgctcagtgacgatagggacagagcagacccaggcatggactcattcccaaccaccaggctgtgtctgtgtccttccacacccctagacaagcaacttctaggagctagagccccaggcagctctctggagacttttttttttttttttttttttgagacagagtctcactctgttgcccaggctggagtgcagtggcacaatctcagctcactgcaaccttcacctcccaggttcaagtgattctcctgcctcagcctcccgagtagctgggattacgggcatgcaccaccatgcctggttaatttttgtatttttagtagagacggggtttcaccatgtaggccaggctggtctcaaactcctgacctcaggcaatccacctgcctcagcctcccaaagtgctgggattacaggcatggctcccagacttctggagcctttttatttagccttcctttccaagcttgggaaactcagttccatgtaccttccccatcataaaactctaagcaccacaaagagcagggcagtatatatttttttattaccagcatatccccagtgcataaaatagtgccaacacatggtaaactgagtgaatgaatgatggctaacatgtcaaaaactgaaggactgaacctttggagtttaatctggagctttgtttactcccagtccctctgggggaacggtcagcctagtacacagcccaacttttatctgtagaagagaagacgcattggtgtaagagttaaaagaccttggttttagggctggctctgcccttgcctagttaagtcacgtaatcaccctaaatccaggattcctcttctgtaaaatgagtatctcatggtagaataacaatgctgtatccagatgtgatggctgcttcattagcctgggctctgagaaaaacagcagatcccagccgatgtggagtagggtgaatgagaaataaactatcttggttaagaaacagatttgtagactgggcacagtggctcacgcctgtaattccagcactttgggaggccgaggcaggtggatcatgaggtcaggagatcgagaccatcctggctaacatggtgaaaccccgtctctactaaaaaaaaaaaaaaaacttagctgggcctggtgctgtgtgcctgtaatcccagctactctggaggctgaggcaggagaatcttgcctctcaggcttgaacctgggaggcggagcttgcagtgagccgagatcgagccattgcattccagcctggtgacaaagctagactccgtctcaaaaaaaaagaaagaaagaaacagttgtagagttgtttgttactacagcataatttaagctatactgatggatacaattacttacttgtatccttcttctctacagagtgtgagctctattgggaggaagaatgctttcattttcactactgtttactttcaaatttccactttttttttttttgagatggagtcttgctctgttgcccgtgcagtggcacgatctctgctcactgcaacctccgcctcccaggcccaagtgaccctcacacctcagcctcctgagtaggtagcactacaggtgcataccaccacaccaggctaatttttgtatttttagtagagactgttggccaggctggtctcgaactcctgagttcaagtgatgatccacctgttttcacctcccaaagcactgggattacaggcgtgaaccaccatacccagccttcactttcttatgtaatatatgatagtcattcttcactctgtgttcactactgaggacaaacattaaaatccagtaattatcccacatttgcagcactctaattttctgagaaaattgtgacattgtctaggatttccaaaactgtagtaatatattttgtttgtttatttatttattttgagacagagtctcgctctgtcacccaggctggagtgcagtggcacaatctcagcttactgcaaccttcacctcccgggttcaagtgattctcccacctcagtctcccgaatagctgggattacaggtgccccccaccatgcccggctaatttttgtatttttagtagagacagggtttcaccacgttgggcaggctggtctcggactcctggcctcaagtgatctgcccaacttggcctcccaaagtgatgggatgacaggcgtgcgccactgcacctggccatataatagtatattttacagtgctgtggtactttttccagagagggatgggaagacaaaacttttgacttggatataatttaaagttttcatgaggacatgcaacacggttatgtgactcagtaacacagtgctgcctaagggctggcgcgtgcgcaggtctgccggcccctgcagggctcttggagttcttggtcttgtgtctcagtggggtttctgctcgtatgctctcagtgtacctgactttagtggaagtcctagccacattcctagtttgttcccctgcacctgcttgagacagaaagtcaaaaaaccaagacctttttgagtagatatgtaagaaaagctcagcagtgccctgagtgaactgcatgaacccatggcatttcttatgggtgtcataggagttttattttgttgttgatgacgttgtttgtgtcaatggaagaatgttttatggaatttgaaatacaaaaactgtttgtggttccttagacacttgcactgcaatagaaaattatactttatcgtaaaattaatggtttgaagagaaatagacagcataaacaaaatatggtccatactatgaaaatgcaaaccatacaatggtgattttgattttcataaaatgaaaatcctaaaataattactcagtacccagagacatacttaatatatacatgtgaaatatcttacacacagatataataaaagcttgccagcattttgatatttgaagttttcagatacatggcttctagataaaggatataattgcatattcttaaggaaatatagttttattattttcgaggaatagacatcagaactcagttaagaggatgctatttggggtcttcttttaatgaatataaaaaaagcaattcataacaagcacattggtttctgagtaaaatgaagcttctgaaatgtgtgaagaatgcttgaaaacaatgttttgtaagccagtgaaacatctcccttcccctcacttacaggattgcaaaatttagcaaatgaaaatacatcaggcccaggtaagcatgaatttcaaatagaaacaaagaatttttagtgtactatatcccaaacattgaaggggacagacttatatttgcgatttatctggaattcacacttaactgggtgctccgtactttatctggcaacccttcccacctcagaagttaaccttcattgtgcaccaccttttaggaaggaaccaggccagcctctgtaaattctgtattggtgagctcgtattaatgcattttcttttgcacatcttgaggctcataaagagactgaagtcgccaaccaatggctctcaaacccaatgcaccctggcaaagcaaagcagggcagccttcagaacttctccaaggggagggctgtgtgggttctcccccacaaagctctattttagtcacagtcattagtgctggagaaaacacacactggtcatgggattcaccttttgccatgtcgcaagaaagtcagtaaaataatgcctgaaagaaggcttgggcttccgtcccctgcactgagcactctggtagtaaccttctgaaacatgcctgtgcgtttttttcaacagtcaaagctcctgacatctctccctgcagagggattgagcagcacttttaaaccagagactgagtgatttcaggcaagtattccggcctttccatgagacctgcacttaggagaaaggaggggaaaggccaacttgactgagctcttgatagaaatacatttgcttacttaatcttcattagctcccgctgaagtataattctcagtttacacaccgagaaacagaggctcagagaagtcaagctgttgccgagtcgcagagccagtagcagagcttggattccaatccaggtctcttgggttgcaaaaggctgacccctatttccatggtaccacccttcatctctccagggaaagggaaagcgctaaagaatgccagggttatggaatgttctaggggagagcataggctgtcatggggcaggctcactcctaactggtttctgagagaagaatatgaggtataacaaaatgaaaatgggcttcatagctagacacttcagtgtctgaagcctgcctccactgctttttagctgtgtgactttgttacctaatttctctctctgtttttttttaagtgatgggatctcgctatgttgcccaggctggtgcagtggctgttcacaggcatgctcatagtgcactacactctggaacccctgggctcaagtgatcctcctgtttcagcctcccgagtttcatttctctttatcagtcaagatgccagcaggaaactgatggcacacacagcaggtttaactgaggagagtttagcaaagggactattaactgaggcttgggcaggattacaggaacccacaggggatggtgaagcactgaggaactagtaattgcagaaagctgtcaccacccaggcctacagggcaagaggagggaatattttattggatcctgttgaaaagctggcatcatggacaagggccaactgacaggggctgtggccctgaagaaacacgaccactgtcggaacaaaaccctggaacagaggtcccaaccttgacctctctccttccctagccagcagtgcaggttataagtctgtagagtttagcccctcagggcacagaggagggcaggaagtggatggaaggggtggggcatagtaatcggagaataacaacactcccgctgggcatcagtttcctttttttaaaatgggaatcatagtatctaccatgtggcattgttgtaaagattagaaatacatagactgacgcattcaacaggtatttaccaagtatctaccatatcctgggctctctcccacagatacagtgatgaccaaaacagactgtatctctgccctcatggtaggtgaaacgcaagaaagccagacgttacataagtatttacaagggggaggagataaaatatcacctctcacacacagggtactcatagtacttgtaaatagtagctataattatttcttaaagtcccccaaagagacctatgctgcataccacttcttgatttcttataccaatatgtatttatgaacaacttttaccgtccggacagattttctcccactggaatacaaagttctgagcatcctgaaagcagaaaacagctgttactccctgtgttagtcagggttctccagggaaacaaaaccaataagatgcatgtgtataagagatttattgtaagggacttggctcatgcaattatggaggttggtgggccactagatctgtagtcagcaagcttgaggagccaatggtgcagttccagtctgaggctgggaggctcaagacccaggaggagctgatgtttcaattcaagtccaaaggcaggaaaaaactgatgtcccagctcaaaggcagtcaggcaggaggagttaccttttactcagcctttttgctgtcttcaggacttcagacaactggatgaggcctacctacaagggggaggacgatctgcttcccttgatccatcagtttaaatgctaaggtcacccaaaatgccctcacagaaacacccagaatcatgcttgaccaaataactgggcaccccatggcccagtcaagctgacacataaaattcatcatcatgctatgctggagttaaaattctttataaagttgtccctcactttccccttcctgcctaacatggcctctctctttcacctggagtctctccaagtacggctcccgggccacctggatggaacctttgtgggaactttctggtcactcagatagcagggccccaggcaggctttgtgtgtgaggatacctgggacagagactcagaaatctgcatggtaaacacagccctgtggctgcccattctccagccctgtgatcaccttatggtgtcccctctccaacctgtcagataccaaaaggaggagaagagaaaccctacaagataagatgtgttctgagtgtcggaggggtgggagggcctctaaggggacagagagaagtgcctgaatagtgaggccgatccacaggatggtgagagaaaggattactaacagagctggggggtgaaaggtgagcggggctcctgtgtgtggcagctctggggctgctgagcccaggggacgtgaaggcgctgctggagcctcctacctgtcgacctctccagactcagcctggcttcctctgccttgcccccgtgcccagtcctggcgaacttccttcagttcatcaaacagctgaatcccttcctgcctcaggaccttggctggtgctgttgcctctgcctagagccctcttcttaggattctctgcatggctggcaccttctccttcaggcttcaccatcagaggagctctctgtggaggggccacctcaaaccaccccatctgatgtaggggcttgcctctgttttcccggagaatttatgaagacatgtggttttaaagatttatctgtgtgtgaagcaggagcaagtttcataggccacatattcatgtgtgcaaaactgtaatcgattatattttgtaattcttagtttctgaaccctccctctgtcacagaaaacagagtcttcttcagataaactcagccaaatgaagggttacaggatcatttctggttatcgacctaggcagattttctcccattcttcctggaggggtctcagttctaggtgtgtgtgtgtgtgtatgcatgtaatgagggttacttttgccctggtgccaagagagagaggcacctgctccatggttgttgctctttgtccacagtggctttgttgaggtgtgaggttccccgggcctttagtcattggcacccatcctcctgacttcctcccaaatgacccaggatatgttgtggtctccagtggccttggcattctccttttcccaaaattgttgggtcctccagcccctctcaaccctctggggtcctgcccgtgggcaggggaggtcctggctcctttttttgcaccagactgtgagtctgtcctcagcctggatgcctcactcagccatgcctcttctaccttcacacacaggattctgggggaagttacctgtggaagggggctcagggcacctccatcctggggttccctaatttgtcatgaagtttctattatctcttgacccagagcttgactggggaaggaggacacacacaggcagctcccctatgtctccctctcccctttctccctttctgctaagctggtgaatttttatttggggcaagccagtgggagggaatactcttcttaggacatggcactttcttcctctttgctgctcaaagtgcagagttaatgacgtagcagtgactccatggggcatcttcagcaccaagagcaatgcctggcatgcagtgagcactaaaggagtattcggtgaatgaatgaatgactacatcggtatgagtttgccatcttgaataatattcctgccctgaataactttggagaaagtgccaaagaacttcatttggtgagaatttccaatctccaccacaaagtagctgtcatccatgcctcaagagtgacagcatgagccctctggaagccagacatgaattgacgtgggagaaaataaacatgtgaagtgctgagctggcaacatgccccagttacctttgaattttatgggaaggcaaaaaataaccaacagttatcacgctaagccttaaaaagtgactttttgatcaggtcagtgctgcaaccttaagaatcccaaaggtaattgatggggagccaattctcagtttcacccaagtccctgcagggccctggggaaagtacaatgagcagcttcttactgtgaaagtgacgctgggctgggccctccgcagggcagaggagccctccaggtgcagagaagctctggggactttctgtctctgacgaatgaacattttcaccaactctgacacaagttttgcttttttctcttaaagtggaatgggtgagttagagggaaggcgggagaagaagattacgtttcggagaagagcttccaagttgaaaacaatggaagctaaaaaatagaggaaagtgatgtatttaaaagaccgtgtttgatagaatcctacaataataataccgtgcttaaattatacataattggcgttcaataaatgcttgggatgaatacattaataaatgaagaatatttgtacctatgagtttttatctgcattagacagactttatggaaagctgacctgagaactaaaatattcctttatgatattgtttctatgggaaaatatgttttgcattccaaacaactgacttgtgagtgggcttttgcagaagtcaggattgctgccatgggggtgggttatgtgacgcaaaccacaatctctagtctgtacctcttgtgaccaacccacatgcttagaagcccacaggctggactcagggaagctgccattggtcaaggaacaaagttttgctaacacggaaataccccagaatatgaacttaaaacacagggcagaaaacagtaaataaaatccagcctttccattgaaataaaatccagcctttcaaatggaacttcagttgtaactccagttaaaatgaagcattaaccgttcattcactcactcatacatatgtgtgtatctcctgcctttcgtcccaagtatcctgcaaataactctgcagggatttaaaaaatgaattatcttaaaggacagacaggacaggaagacagataacagcagacaagagatgtcaacagaattgtgggaaatggggagtgtgggatacggtgcctgtacttagtttagcaatgcagcagtgcaagcgaggcacctgctggggcggcgggggtgggggcgggtttcattccctctgtagacccctgtgagactcagcatgtggggtgacagcgattatgggaggtgagtgagagggagaatgttgagaccagggaaaattagccattaagtctgactcaattttgctttcctcggtagcttcttctacccctgcagccaggtgtctatccctctctccttgagaagcttgttttaaggagacattgaaacccaacagaagaggcttaggactaggagactcccggcagggtgtggattggatgaaaacaaggggattaattgaaactgcacgttctccactccccaccctgctcagaaacagccctaacccggcatgtttccaccagcaaccaccagggaaaaggtagaaccagttggctcaagagtgaagacaggtttgctgacattgtgtccaccaataaagaatcacatctcgtcaccctagggtgtcaccaccgggacacaaaattcatttcacacaaagagctttggagtctctttttagcgcctcatgcctatcagattggggcagcagtaattaccttgtgggtaggatgagaaggacagttactctctttttaaatttaaatttactttttatcaaagtaatacatgtacagagtttaaaaactctaacaatactataaggcttataatgaaaaaacaacaacaacaacaacaaaaaaacagtctcccagctcatgcaaccccacacctgattcccactccctgaaggcaattgctttcaattcttttcactgtatcttctccatatttataaatcatgtgtgtatactgctcatttcctgattttttccatttggacattatctatttctttcttattttggacattttgaattttgctttcttcctccaccatccacataatcactccttcaaatgctcaaaatgatgccatattttagtcgccttcatacttggcaataacttccttttcaaaaatataagtaatacatgtatatagcttttttgtgtgaatatgaagacatatttatatttttaaataaaattattcttctaatctgaagccatctaaaatatagcatcgctttgaacatttgaacccaggtcatgagagagagtctgtttttctgctttcactaggcacattctccttgaagtggccatgagtggtgactgtggccgggtggagaaatgtgatcctagcacactcggcatcacagcactcccgggttgacacagtcataataatgcaaaccttgtctattagctctccactcttaaaatcaacctacccacaaagcaaggaagacatgagaatggaaacagagctcattgtaaatgttttcattcttgatgcaaaattaaaggtacaaatagcagataatgggagcaagggagagacagaagggaactgtgctgatatcctcagctaatgtactagggagtcaaaagttactttctagatggaggaagaaatagaaggttaagtatatcatataagtgtacagagggaacccatagaagaactaaattataaataaaaaagttgggggaaaggaataagagattatgttcaattttatagaggtgagtccaaagagcacctgtaatcccagccatttgggaggctgaggcaggagaatcgcttgaccccaggaaggtggaggtggcagtgagccaagattgcaccactgcactccagcttgcacaacaagagtgagacaccgtctcaaaaaaaaaaagaaagaaaaagaagaagaaaaaaagaatgtcttaaattgaccaagaaactgtttttaaaaagtcacataagctaattgatcggtcctgatcactgactcttggtcaacttttttttttttttttttaaggaaaaaacaaaacttcagtttaacgtttctgcaatgcaagcttgtgatttatgattactctctaagtggatatcaggattgttatgaagacttaaggcccagtattttttaatagaatactcatctaggatgtaacagtgaagctgagtaaactataactgttaaacttaagttccagcttttctcaagttagttataggatgtacttaagcagtaagtgtatttaggtaaaagcagttgaattatgttaaatgttgccctttgccatgttacattgaacactgtttggttgcatgttgaaagacatgcttttatttttttgtaaaacaatataggaactgtgtctacaattaaaagtgaaacattttggcatgtttgttaattctagtttcatttaataatctgtaaggcacgtaagtttaagcttttttttttttaagttaatgggaaaaatttgagacacaataccaatacttaggattttggtcttggtgtttgtatgaaattctgaggccctgatttaaatctttcattgtattgtgatttccttttaggtatattgcgctaagtgaaacttgtcaaataaatccttttaaaaactgcaaaaaaaaaatgtcacataagcatactttttggagttaggaagttcaccatccaaataatttttaaaagaggtcgttaaaggtagtagtctctggttggtggcatgtgtgtggggtgagccctgctagttttcagtataaacacttccttataatctgatttcttttatctcgtgcatatattacttcaatttttaaaacgtaacaggtggaaatactcaaaaattgaattcagtgtgaacacagagccataaatgcggatactcattttgcaacggccatctgtattattgtgccatcagaaattgcacatttcccaggcaccactttgaatggtaatataagcttaatgggtctcctgttgaaagacttaccgagttagcgttggatatgggcagcattagggaagcaggataatgtactttcatggctcttactataaggtaagggcgccaaccacttagatgaggaggaaagacctcacagaagtgaaaaatattcctttatcatgtgcctggtttcttgtgcatctttgcaaagaacatggctcttggtagcctctcagtttgttgaaagaatacaattcatagcaatacacacaagaccgtccaccatctgatcccaactttttcagccgcctcttcccctgtatcctgtaccagggacatgtggctgctctccctttctggagagatacatactcctttatgcttccatatctttgcatattctgatcctctacttggaatgcttttccccaccttcttaagggcatgtgttaagacccatcttcctaacggagcctcctgcaccgcagtctccccaggctccttagacagagaggtcctctcctgactgttcttgccagcctgtgacattctgttcctcaactatattcaacaactgccaccaggctcctcttgcaagggagaaaatctaaagtgatatcttggcttatgtctgtgggaaaaatataatccagaagctcaggaaaccagttgagaaggtcattgagatgttctggcaagagcagaggtcaggatgtagttttgaaaatgtaagtgctctttagacacttgatggccaaggattggccatggggaatgctctccatcccccccgccccagtccattgtgtgcactcttccaatcagctgggctcagctacgtttgtgggcagatttgcactgtattcatttatccttgatagtaaggcattctgcagtcatttttaaactttttaatcatgggaatttgcaaacgtacacatataaatcctcatatacctgaaatccagctttaacgattatcaatactttgccaatcttatctcatctccccttccgcacacttttcttttatggggtggtagggtaggatgggcattttttaaatttttatttatttatttattttttgagaaagggtttcattctgctgcccagggtggagtgcaatggagcgatctcggatcactgcaacctccgccgggtgggagtattttaaagcaaatcataggcatcgcagagtatgtttctaacagataaggacttcttttaaaattgcggtacaaagtacataacataaaatgttctattttaaccatttgcaagtgtacaattcagtggcattaagtaccttcacactgtgtgcaaccatcaccaccatctgtctccagaacatttgcatcataaactgaaactctgtacccattaaacaataactcctcatttctccctcaacctagcccctagtaaccactattctactttctgtctctgaatttgaccattccagacacttcatctaagtgaaatcatacagcatttttaaaaatctggtttatttcactcatgttttcaacgttcatctaagtattttattccttttaaagactgataagggcttttaagataataatcacaacatatctaaaaaatttaataataattttctaatatcatcgaattagctaatctatgttcacgtttccaaaagtatgtctttaaatgtcattttacagttagacagaatcaggatcctaacaaggtccacacattatatttggttgatatgtctcttaagtctattttaacctaccatattctttctccttatttttcatgctatttatttgttgaagaaatgagttaatttgtcctgtagaatttccctcattctggatttggctgattacatcctcagcattgtttaaccatttcctctatcctctgaatttcacaaaaacaaatggtcagatctaggggccggattgcattcaggttcaactactttggtgggctgtgtgctttctattacatcacagcaagaggcccttgtatctgatggtctcacttcttgagatagtaaaacagatctgtgggtttgggtgctgccagcccgatacatccattgataacatggcatttaaaaataagtgttcttggtaagagtggcaattcctcagggttctagaactagaaataccatttgacccagccatcccattactgggtatatacccaaaggaatataaatcatgctgctataaagacacatgcacatgtatgtttattgtggcactattcacaatagcaaagacttggaaccaacccaaatgtccaacagtgatagactggattaagaaaatgtggcccatatacaccatggaatactatgcagccataaaaaaatgaagagttcatgtcctttgtagggacatggatgaaactgcaaaccatcattctcagcaaactatcacaaggatgaaaaaccaaacaccgcatgttctcactcataggtgggaattgaacagtgagaacacatggacacaggaaggggaacatcacacaccggagactgttgtggggtggggggagggggtagggatagcattaggagatatacctaatgctaaatgacgagttaatgggtgcagcacatcaacatggcacatgtatacatatgtagcaaaactgcacattgtgcacatgtaccctaaaacttaaagtataaaaaaaaaaagtgttcttgggtgtggtggctcatacctgtaaccatagcactttgagaggctgaagtgggagggtggcttgagcccaggcattcaagaccagcctgggcaccaaagtgagatcatctgtactaaaaaaaagaaaattaaaaaattagccaggcatggtggcatgtgcctgtagtcccagctatttgggaggctgaggctagaggatcacttgagcccaggggatcaaggctgcagtgagctatgattgccctaatgcactccagcctggatgatagagagagaccctgtctcttttaaaaaaaaaaaaaaaaaaaaaagtgttcttaagactttgtaaatgattgtaagcatacctatgtgtctgtgtctctatttatatcagtcaccattcttagccctagggctgtctttatttttctgtagatctttaaaactccccaaagtccctgttcaatctgtgatgttgagtagccactcctggaattcttgagctctcagatttcatgtaagatagcaccctatttccaattagtccttgagttgcctgcacatgggtgctcactcagagtcacacacatccacctggaaggaatcatcacccacctgccttggtagcctgttccaatgtctaagcactcccagagcataagtcttccctctgtctggtctagccctccctgtgaagttaaattctgtttcctccagttcggggctcggtggagctgacgagcagctggccagcagcccctgcagatgaggcctggggaaatgatgcatgaggctaagacacattccaggtagtctacatgcttcatgaatttaatggaagactggcaaggactagaatatgttttattgcaactttctagctgggattcattatttttcttttaaaattaaatacaaataacttatttctaaaaagtaaatattcagagactatgaacgaaacaaacaaacaaaaaagaaaacaaaaaacctaacaattttccagagttggcattgtgcttattttgtgcctttatagatgaacagagtcctactggtgtcagatttaaaaagtcactctacctcttaaacattttgccttattagggtggaagggtcaaagagcaaggagggagaagacagagcagagacacagggcagaagagtctcagatgagggtggcaggggtacaagagagcctgggtctatagacagaaacagagcatgttgctgaaactgcccagactctttatttcaatctccagtctgtaaaatggagatgaagcgccccgcctgatccctttttagggttgtgggagatgcagaggagctaatgggtgtgaatgtgctttgtgggctgaagctactgggccccttacaggcctacaggtcaggggaaagaagagagtgttgccagcacctgtgagcagaattaacccattggctgattgcctggccacctggacttagcatgtattgaactgaatacatgtgcaggggctcacagccattccgattctaaagactggttaagtttcacaacaaaaactgaggataattgcagggttgtcaattattgttttgccatctactattacagttatatttatttaaaaagtaaaaggatattttaataatatctcaaccactgaggatggtaagatgagcaaaataggatacccactcccaaggagttcataaaactgtagggaaacacatgtataaaaatatgtatataaagaccaaatagatgtgtagcccctaggactctttggctcgttagaaaaaacagtagaaaatggcttaacaaaaagtggggatttgccggttcatatagctgaaaactctgcagaaagtgtggctgccacccagcttgatatagagcctcttggctctaacctttttctccagttgcccatggcaacctcagcagccccaggctacagccccctgccttcaagtccagctagtgagctgcctccagcagccccagcccggtgctcccgcagctcagtggctctacatggatcctgagccccttcctggaccaaccacagtggtccctggcctggtttgctctgactggtcacccaatgcacagggaccggaaatgtgcggggagtggctttctcggacgaaaactgggaaaccattactcgaattgggatggatagatgctgaatggccaagaaacaaaaatatcctctaagaactatgggaacacagaaaaggtgtgtccacggctagcctcataagccggatgacctgttcagtcccacccttaacaagtttcacattggcttaatgctctgctgtcactgactcaacattcttaataatttctgaacaaggggctccacatttgcgtttggtaataggccccactaattacatggctagtcctagaggtgactaacattatattacctacacaaggaagtgactttgaaactggattttgaaagatataatgaaacagcagttttgtaaatggaaaggtttgggtggcaggaggaggaggaaattccatcataggcaagaatgttagacgtgagaggcttgatgagaaaatgaaaccactagcgcctcaagtggttggggcttaaagtgactgtggggtgtggccccaatggagtgggaacaaaatattccttcgatgaattaatattccttcaatgaattaataaacacaagtgaagtgaaatttaacatgagaaaaaatagtttatattttttaaacctccatgattccaaatggccgttacaagataactcctattttccacctcacttttctactgcacactaaggctaactttcccctgtgtaacataagtgcctactgatctttatcactagcgtgttagcaaggttagcattccacttctgtgatttcaccacccaaatatttatgaatcagagagatgtttctaagaacatgttttccaattgtttactttataacaataatagtgtgctttaattacaaagatgacgttttacaacctaaatagaacaagcctcagttgtgtgggagttcattgctttggtgataaaagagaaacacagacagtgactcaggtggaacattcgtttcattttcactttgtgtttcctttggttctacatgtcaggacatgtaacagagccaaggcagaagagtgctgtggggggtgtgaaagttaaagctaaggctctatatgccagaaagaaaggacaatgtcccctctcacccactggctcccctttcaaggccaatgccaagggggaaaaagaaggtggcttccctctggcacatgaatggtgagctagttaacagtcagtgttttgttcccaaattctttaaaggaatgctgaagagataacactggttcttctgaattgagaatctctttgaattcccactgctgtcttatttccatttaaattaagcttaagaggagaaattaatgttggggtatctgctaagtgcccagtgtggagcctctttctgtcttgttcattcttggatgtccagctcttgaacaatgccaggcatacagtaggcactcaatacatacacgaggaatgagtgtatgaatttattcctcacagcacttttatgtgaggaagatgcgggggcaatcttcagataagaaaacagacattaagtgttggaaattgagagaaagaggtggtttgtccagcaaggcatgtccaacacagacagagacaatatggggcctcctcggtgactcacttttatgtgactaggtatgtgtctcttctgtagaaacttggtcaatagggaatgacgacaagaaaaaaggggcccttagaaaataatatcaccatcatgatcatcatcttcatcatcgactgtagacacagcgcttataatcacaaaattgaagaactgtaaggaatttcagaatttataataatagaagctcccatttactaatgtgttgttatattctgggtactgagttacatctatttatctatctatctatctatctatctatctatcatctatctctctatctagctagctatccatccattcatctatctagcaatcatctatcttttcaccccctgccccatatcaaccctgcaaggtgggtcgtattagctttatgttcaatgttccaggccagtaagtggcagaggttgagactcttgctgccttctggagcccttcccttagcacagcctccttgactaacacaggaggaatttgaccctcagagagggacctcaggtttctcagctagtgcagaaccagaacttgaaccttggcccgagtgttgtttccacttaccacagtgttctcagtgtagatgagtacactttggatttctttccgtttcgcttatataagtcactatgaggtttagcaggacaaaaactgagcttattgaagattaattcatcattccatctcctaccttagaaacaattttattctttcctggattccatctcagcccctggcacatggtaggcattcaaggagtgcttgatacataattaagccaggatttgatttggatggaatctcagtcttaggtaccccttaatggcaggactggaaaaaagtaggcaaatacactcttcgaaagacacacagtaatattagtttttgccttcatgaaagtttatactttcatcttttaagaattaacacatccgcactatagaacaatgggataattcagaaatatataagtagaagagaaaaaaagttacccacccatacttccaacaactaaatacttttaatattttatggaaatttctttatttcccttattctacgtattttgttgtttatttatagcttttattgagttatgattgttctgtgttgatatatatcttactttttaaaatttatttatttttaacttttatgggtacatagtaagtgtgtatgtttatggggtacatgagatactttgatacaggcatgcaagatggaataatcacatcttgggaaatggggtatccatccccttaagcatttatcctttgtatctcaatccaattatactcttctagttatttctaaatgtacaagcaaattattttgactacagtcaccttgcggtgctatcaatagtaggtcttattcattctaactatttttttgtaacccattaaccatcctcaccttcccccacccccattacccttcccagcctctggtaaccatccttctactctttgtgtccatgggttcaattgttttatttgtagatcctgcaaatacgtgagaacatatgatgtttgtctttctgtgcctggcttatttcacctaacataaagaccttcagtttcatccatgttgttgcaaatgacagtatctcattcttttttataactgaatagtactccactgtgtataagtaccacattttctctatgcattcatctgttgatggacacttaggttgcctccaaatcttggctactgtgaacagagctgcaacaaacatgggagtgcagatatctccttgatatactcatttcctttcttttgggtatatactcagcagtaggattgctggatcatatggtagctctacttttggttttttgaggagcctccaaactgttttccataatggctgtactaatttacattctcaccaacagtgtacgagggttaacttttctgcacatcctcaccagcatttgttattgtctgtcttttggataaaaccattttaactggggtgagatgatatgtatcttgcatttaaaacccacattatctctacagcattccctaagttgtaatctctttgtgaatatcttttaaaatagtggcatagcactgaaaaaagacttgtttaaataagtgtctagtttgtcagttctcaactatgtcaggctgaggatcattggcttttcctggttcttgagggaccatttctggtcttcattaatcactttatcagaaagctagctggaataaatattgttatccaaagcctgagggaaagcataaattacagctgtgaaccagtgaggtagattttcatggtacttggtaattatccgtaaatttccaataatccacactgactcctacattatgccttaggccccaacctggctcttcttcctccctctctctcctctctcctctgagtctttccattactttgatatccccaacatgctgatggctaggggccattcccttctttgacatcccactgctaagcattttgtcccgaaatgcccttattagtcttttcccacttctactgcctacaatacccaatcagttccttcccaccccaatgctatgctctataacatctgagataggggcattcctcccctctccatctatcctaacaccaagcttctgccaaaatccaaagatgtctgcctagaagtttcccaaaatcatcccctcctgttctccttaccagccctgcctcaggtgaggcaacactgctgtactcccaagactgatcagatgcctgcttagggtacctgtaatggggagggcccccgaaagtgagggaagctcagttttaataaagcaatcctgaattttgcaatgaaaagatccaggggaaaaaggctattttaatttcagtacacataagagcattgtgttttgtgaataatttttattttgagtgaacaacatacgagagtggggataccaccatcttcacagttcatctggcctccgatggcctcacctgaccagtgttgcagcctcctgatggccctccatgggcatcttcctctcccatccagcccaccctcagccctctaccagcagtcttcctgaaaaacatctgtttgtgtccatctgccactgacagaccccctccctttgtccctggggacagagtccaaactgattattacatcttcaaaggctatcacagtctgttcttcccagacttgcttccctaacgtctcctcccttccacaaatactcctgctcagcaattgcctcactgttctccaaacactgtgcatgttctctccattccgtattttcatccactgaatgcgtattcactgtgggtctggcatgtgcctggaactgtgcaaagagctggaaataaggacagagatgagcagggcacagccccttcctggcactcacagcctcttcatatgactttctctatgcctggaatgcctgtccacttcccttgcctagaaaacggtcggctcaacatccagctcgacagtcacctcagccatcagctcttgccagctttcctgggcagagccgtcctgccccactttagcccttgctgcatcaggctgtaactatttgttatcaagtctgtctccccatgggctgtgagcacctggaaggcagatatgcatcactgtgtacctgcagcttctgacacggtatccagcatatagttggtgctcgttaaaatgttggaggactaaacatacatacatatatatatagtatatatataaaatacctactatattgctggacttctgcttcatgtatattaatttgccacctaaacaagatttttaactcttcaggtcaagaaatgctcttatattgtccttgtaaccccaaggtgtctaagtagactgctgagagcagtgtccggtaataggacacaatttgatgcattgattgataggcataaactcactggagtgactcactttgccctcagccactctagtttcaagtacaagttcatcatctgatgattcaagttcatcgtattttgggaaaagaataaaagtccaaaaagccctactcagtttactcagtcaataacagggcttatgtttgtggttaaagcaaattatgaaataattgcaaatttggcaggggggaaagtatccctgagggcacagggatctggaatttattaagcatgtatcctctgggacatcaggagtaagaattttctggtaaggtcaactctagaagcatctgtgcattcagcaagactttggtaaagcgagggtgctcattttcaacaaggtagggaaggctaaagaaaagtaaacacacatcatgctctctaagattttgaggacagtatcgcttaatgtaagttttgaaataagttagatttgtgtttaaatcaagtacctatgagcaattttcttaacctttctgtgctttggtttcctcatctgtaaaaccgagataaaaaacctacctcacaggttattataaggatgaaataagatactgggtatttttaaaagtgcttactattgtgcctggcatgtagtatgtgctcagtaaatagtaattactaaataggacctggccacacatcaagtttttttaaatttgttttaaaatcagtcagtaagccagcctgagagatggaactttccatgagggtctagacactttggtgtctcaggtttccatatgacttggtagcttcaagggtaaggcgtgaagagggaaaaaagcaatatttattgaatgtcacttttgagggtgaattgttttttaattttggggggtatatagtaggtgtatatatttattgggcatgtgagatattttgatacaggcatacaatgtataataaaggtgtattgttccttaatcccatgattaaggaaacagatataaatgaggaaacagacattatcctcattttacaggagaaactgaggttataagaccttcttaaaactaaataagcagtggcagaaagaggatttgaactcagttctatctgaccacaggttctttctgccatccctggcttctaccctacaccatccccttttcagccccaaggatagtatgccttgccagccactagctaaggtgcccctaaaatgttttagggtgctcttcttacaatcagcttttttcaccttggccctattcttagcaaaagcagcatctccccaggtggagggcaaaaaaggggttcacgagtctcaatggctgctaaggttcctttcggtatgagaatttatgattctgacacgatgtagagccacatttttctctgtaagctcagtttcctcatccatcaaaggagggccctgaactgcatcagagcatcccaagtttcccgtgagcacttgccaggaggtggtaggtatcgtggttgcgcactcagacttgggagtcagactgcctgggttgagtcctgctctactgctcactagctaggtaacttctggcaagttatttaccctgtctgtgcctcagtttcctcatctataaaatggagatgtttacggtccatcaaagggtggttacaataattaaaagcattaactgtacgtaaagggcttagtacatagcacggaacacccagaatgctacatagtaacattttacacttagaaagaagggagggaactaatcctctcaaggtcccaggaataaaacttttggcagccgatgctagacccagaatgtatttgatatcttctctctttccttagaaatccttgcatgacttacattcaaattccacatatctatatatgtttaatacaacacaatattttaaggattttttatttaaggcagacactcaagtaagatctcctctgtttatctcatggccctggtacacctgtgtgtgctcatgtccagtttgagaaaatggaagtgaatgacttctagggtccttttggctatggtgtcttttagttctgagaatcaccgccaaacatctacacctgctcaggtgcagactgaagtgaccagctacctggtagccactcatgtcaccaaactggcatagagatgctagagctgcccgagctacactgagaattttgcctgaaggcacagggagaagcacagcctggctgctctaattctgtattactagcccatgctgcagactacattttctgcttcaaggtagatgaagaggaaataaaggaggatgggaagcagagaggggcagggatttaaaaaaaggaaaaagcgcctgcaggattttttgtttggatgttaggaaacaaggaaaatgcacaagtagtcacaatctttgggggtccttccatcttccaccatatatatgccgtgtgtagcatttgaaggtagacatcaagactcattctttaaccccatttaagcatcctgagcaatgatggtatttgatatcctttctcttataaaaatatttgaatttgtatagcattcaagcaaaatattagcaacactctaaattctaaaagtagggaaatgattaagtaaatcatagaacatccattggcaagttatggtaataagaatcaggatagtggttacctctgggaagcaaagaggtctacttcttgagtggtgagttcctaatgtgtttgattattaaaatgtgtgtgtatatatatgtgtgtgtgtgtgtgtgtgtgtgtgttctatataatcttttgtatatatgctatactttataataagacatatttttaagaagaaagaccatataccattcgaggtaataagcaaaagagcaaatttcaaaggtgcatgcaatctaaaatcataactgtattttaaaatcatgtacatgagaaaaaagattagagggaaacacactacagtgttaatagtgttgagattgtgggtaatatttttcccttgtctgtttcccaaattttcataatgacaaaaaaattatagtaaaactttccccaaagaaatctttaaaactatgaatcttttatcttcaaatcactttcacatctactatctcatttgattcttacaacaacctagggggagtcaatgctaagtggttacgttttatagactgggaaactgagacatcgtgtttatgacttgtatactcactcagttgactggaggtaaacctgtggatgaatccccggtctcctgagtcctgctaatctactgacttccaggacttcatcttggattctggggtctctggattcaatctctcaaatgggaatatctgctacctgggttttggccctgtagaccaaggtagatgtctatggttgttgatgatgggctacacacaagaagtcaccagagatgtaatccatgcctggggtgttctgccacatccctctctcacaaggcacctagtccatgggggtgaaaattcttggaagtattggaggtgggagaaggacaggctgtgtttaagttggacaacatttcttaactctagtttttggaggggaagaaaggttgcagaaatgggtctgtccttgttctattcagtgccttacctatgatgtcttctctctccccatctctcttagggaaagttgccagaagctcatagggtggctttggcagagggtccccattcaggaccgtcagagctcagcccaaggctcctcacttcagaaaagttgggagccttagaaacggggagtgccttgctcaagaataccaaagacagaaccagaccccaaacccaaatcccctgctcctagcccaggatacttggcagggccatccagcattgaggagagccccaggtgtgtggtggagttgctgtgatggggaacgaggatggctttcatcggtgtctgcctgggctctcactcccgccccctcttgattgtcattcctggagatcgcttgacttcatccactattttccactgacaagtgatactgaatgagttcctggagagattcaagggtacctcagaaagcttctcttgattcataattaattaatgataccactactgagggctgactgggtgccacatcctcagagaaatgtcacaacaatcttatgcattaggtgctattgttagtgccatttttcatttgaggaaataacttacttaaggtgacacagcatctaagtgctgaatccagaatccaagtgccttccacactttggtgcctactgtgtgatgctgcccctgtttcctgacaatgccaattttggacactattaaactagcaatccccacattcaaactgactttgtagaaagagtgagcttcggaaacagaataaagtataagaaaatggactccactcccgttccaaagcgaagaagtaggttgagccaggcagacagagctgctagtactctgccgcttctctggcagatcttatcttgtgtttctagcattctgggcacgaatacagtcttagggtttagagaacagagtaatggggcagaggaatgtgggaagggactgtgcactgaactaagaaactgctagaacctttaaatatctcaaacttttttgttttttcttttgcgtttggctccctgcaatgtttttctgtttagatttggttgccacgagtgggctgtttttagttgcctagttccttcccctccccttttaattttttcccttccttttgcacatgtcccagcatgaagtctccaactcttatctcactcagcaaaacataccaaggctgatctgaatgtggattccccaggcaattcaccatcataaaacctcagcaatcttcaagtctctgcttaaccctctttcattgaggattaacccctgaaatcaccctagccagggcttccttctaaggcgagacagccattcttttgtttgcatggagaagagttttggtgtggaaagcttttctgtcccctccacttcatggcactgcctgtgtgtgtgctgagagtgtgcacactggacattggtggcattaactgaagtcagggtaaaataaggatgcaaaggactcagatgttgatcactctcctgtggcaaagacctcaggggctctgccttgctctgttcttttccagtctctcaattcagcaggcatttcacggttctcctgggggctgaggggagggaggcaggcaggagtagttttcgttttccctgggtaagagtttcattcaagtgggagtggacttagttctctgtcaagattcttatcacttttcgggtttagaatatcaggatcagacttccgtgaacagctgacagcatttctatccaacttggagattccaaactaagagtaattagaatgaagcaagattgataaaaagaactggaggcacaatggtaataagaataacccgaccggggtgttgggggcttctccccccaccccaattatccttcccttgcattgttttgtggaggacggtctggctgtttgtttacttgacgccctaagttgaatttccccttaaggacaggagcagatctccacagatctggcttgggtgttttaatggaatcatagttcaacctgtaaactggtcaaaatttctgtttcacagcagaaagagtaaaaagcttcacgtgttctccctcctctccttgcttcactttataatggtgctatttattccagaacaatctataagtagataaaatagctaagtagagataacaaataacttcattcaaatgcaaacactcctccacctaatcccgcccggtgtccgccgggctgctccgacacgcccggggtttacctgcgcgcactccagcgggagggcgggttgtggaggtgtgctgagcggcgcgcgggggtgagggcgtggaagcggagggtggggcccggagagccgttaccagggcgaaaagtaaagcgaaaacacccgccctgcacttcccgcgcgacgccgctggaaatcggttcaggtccagagcaggatctcggaggatcccgcgtggaaccccagggctcccgggtccgccggggcgcaaagacttccgaggccgccctccgcgtgttcccaggcccgtggagaggtgggtggtctgagtgaggtcgggcttggcggcgaggaaccccggtggggggaactggggacttcaagtgagacccaggctccagacacctctagtttctaccccaaattaccaaactgtgaccttcggccgcctctctcccagaggcaggtggaaaggagcaggtgtttctgcccttcaccgtgcccccacaccctgcggccgcgcaggtctccctcccaggcaggtgcgaaagtcccaggccacacttgtgtctacaaatagtcatccacgggcagtcaagaaggttccttggttctgccgctctctgagcagaaattgttggggtcggggaataagaaccaggaaatcgtttttaaggttcaaacccagttctgctgaggtctcagctcgaatctcggaccacggggccccgcctttcccgccaccctggcttgagggcagaggggatttctgctgcgggttccgcctgtggtcagtgcgtccccattccgggccgtccggtcccagtccaatcggctctgggagcagaagaacacgtgaaagctgaagatgggttttccctaaatattgcctgagagcggggcgacccccaggcctgggcaggttcgcggaccccaaagcaccttctctttccccctcctcctggccgctggcttccgccccctcctaccctcccaccgggttgcctctgattcctcctggactccgatcttttcacgctcttgttggtttcactgacatgttcttgtcaatttcaaacgctttgtgattgtaaaaaaaaaaaaatcgaaccgatacggtcctaccactcgccctagtttcggagcccggagctgtcctgcgtgtgcgtccatgtggagtgtccggggctgcgggctcgggcgcacggtgccagccgagggctgccctccgcttttgtgttaaccggcgggcttctcgcggtccccgccgcagaggtcacacccggcgggtaacggcgtggatacaccgaagggtgactttggacaccttccccacaccacagactaacgcttctgcccctactccgcccctgctagagaagtaggaggccagtgggggagggggtattttcctgaagctccagaaaatgaccacgcattttagagaaaggtcgtgcccgcttcccagcctcacctagtctgggctggggccgggacccgcctccccaccttccccgccccccccgctcttcaacctagcggagggacagatgccagcgcggtggagtcatgccgctggcttgggcaccattggtcatgcctggaacacgcagcagcgagtacgcacatctggcggctatcccgggcggctccggtcctgatatggagagagagggcgggctggtgtgtgtctcagtgagcgaggctgggggaacgcgcctgggctggctcctccccgaacttgcatcaccagtgccccctctctccacccgccttcggccccgccttggcccctcctccaccccccttcctccgctccgttcggccggttctcccgggaagctattaatagcattacgtcagcctgggactggcaacacggagtaaacgaccgcgccgccagcctgagggctataaaaggggtgatgcaacgctctccaagccacagtcgcacgcagccaggcgcgcactgcacagctctcttctctcgccgccgcccgagcgcacccttcagcccgcgcgccggccgtgagtcctcggtgctcgcccgccggccagacaaacagcccgcccgaccccgtcccgaccctggccgccccgagcggagcctggaggtgagcgctggaagccgagggagtgagcgcgacgagggctgctcgccttcattcccttcgcgcccctctaagtaaccagtccgccgacccctgacccaccccggatccgcgcccccagcctccggcttggaaataactctggcttaaacttcttctaagccaccgctgctcctcggcgcttcgaaaagtttcccgcaaagcgaaagaactaactttctcttttgacttggggcgcgaaaggttcctggtgacggaggtcgggcgtccactctgccgccagcctcgagcgccgcttctctccgccgacggcgctggcttgcccggctgggagagggcgtaaggtgggtgggcgggtgcgttggggtgtccgaggctgcctcgctcgccgtcccgctccatccctcgcttcgagacacggcactgtgggagccgatccttcccgggtggggtgggggggggcgcagagaggcacgaaggccggaggcttgcgggagggctgccccacgcgccgagaggaatgaatggggaaggggcgagagggcgggaggcgtcccgggcgcggccgctgggggtcgccctgggtaccccgcagcactggcggcaggaccgtgaaggcaaccccgagaaaaagttagctgggataagcttggaagtggcgagcgctggtgtcgcgctgtcccggggcggaagacggggagggctcccggcaacggctggtgtccggaccccgagcccgggactcccacacacctgggactctcactctggcttttccttcggcgggtccgcgggagacccaccgtggcggggaagcgagggtgtggagccacttgtgcagatatttgagagaatggctttgtggtctagtgccaggactctgagcgcttacactgcaatcgatgtcgttgggcctcagtatgcggagccgggaaataagggcacatgggcagtaccggccccctctgcgtgttggagggcacaatgcagtggttggaccagataactactaaggtcctttctgtctggagattttcagattttggagtggtgtagtggggagaaaaggagccagtgaggggacttgaatggggtgggtctctatctaatgtcattcaccagtgtccagacagtgggggaaaggggacttttctgcagggcatcttttccctcaccagctttctttccactggattcgttctccttctctgctccccccactcccattttcatttctcatctacttcctttcctcctaaacattttcttttccctaatttcattgcataggtcacatatgctttcttacaaataaaatagttactaaatccttgatgaacccagaaagaaaaggagagccagaaaatctggatgttctctcagtgtacccctttcgttgtaggtgacagtcatatcttctgttcgaagtttctgtctctgtaacttaaagtgaaggcaaaaaattggtattactgtccccattgttttgcagttagcattggttgtagaataatgctacaacatacaggctcctgctttgaggatatcctgggcaaagatgggatggggtgaggattgcagttactgtcggaatggtttcagagacagcaaagaaggcagcaccccacgcccgcagtggggataagatacagcacccagcatctgtggcagtgatgggagccttctttttctctctctcttcctccttgccctttagccattatagaattcctttttctccatggccgttttcttcgatagcccctccctatctcagtcctgtcaaagtctcctctgtgattggtaccaggtgccaggactcttgaccccttatctacctggctaatggctctgttctctggttgccttgttggttgatcccttgaggcggtcgatacctattggtgatggagcaaaatgagcagtcggtgggtgttcagcagcttggcatgggctgggccactcaccagctttatgacctcaggcaagtcatttttacctccctggaccaatgtactcattatgaaatgagaatctgacctagatgattctaatattgagagggtgtgatttccattagatagagtccatgattccttcctttttaaaattggctgggcatgggacagggccagtggcttcgagtgtttacccagccaggggaggaggaaggacatagccaagatgcctcagaagctttccaagggagaaatggtttatatgtgagaattggttctctttcaaatatgtaatgcagaaatgctggcatcagcaaatagtggggtgaaacctacctggtctgtgaagaacttggggtcaatgagagtacaaaagaggctctgactgacctgaatgtcttgaaggttccagttaattcctcactaacagggctttattgaattgataacaacagaatgagtttttcctgaaatggagaagatggagtcacagtagtaatgactacccggtgtgtatgtaaatctcatatgtccttctcaacagccctttggggaaggcagttttgatctcaaattacagaggaagagaatgagaggcccagaaagcctaagtgatttgttggtggatgctcagcttatgagtggcactgataggcttagaaacattgtctctggcccttgatgcccagctttgcacctcttcaagaggtctgggaggaagaccaagatatgaagagttagtgaaaggccagtactggcttcctagtaacataagatggttagcaagcaatgcttagtggaaagaggatgaaaattaaaagtgaaaattcaatgtagctgtagctactaggaaataaaaatctgggagctgaatttccagttaaaggaatacatgagtaaactttcactttcttgaaaatgatgaaactgccaatgatacaacatgatttctgattggaaataatcaagcagaaacaaaatgcaagttcttggtagcaagtctgaacaattttatgatcagcatagaaagtcaactctgatctgaggtccccaaacaatttttttcaatgaccgggatgtttgaggatctcaactttctgaaaaattgtgtgaagatttaacttcatttccttgtggggacacagccgtagtctaggctgaatcatacctcgagagactgagtaaaggaataactagaaagtatcccgagaagttaagctttagcctagtgccgagaaaacccaaatctcgacagatacatctgttttattttctgaaaggcttttaacatttttacaaccatttatgtccccaaggaagcccacccaatgcttttcataaaagcattccataccactgacattcttcagcttctttcattgggactgctgactttacataagaagaagggtagggggcgggagtcataaacagcagaccccaagccctgagagctcattaataaacctagttggatggcaaaatggaactacactctactgcagtggaattcaaagtccccgtgtagaagggagccatccaggcctccaaacaaagaccagcccagtggcagctctgaatgtcatccccgaatcactgagtttttaataaacttggaaagggaagggaaacatgaatgcatgggagaatcttaagcctctggctttagaaggctagtttctcagagtttattgcctgacagcgacaagtatcctcccagcatcctaagattataggattaaattgagagaagaacttcagttctgactcatgacacagggctttgggaaaagaattacatacatagcctgggtttctttgactagtcaagggcagatttcattggcctggaagtcttgcctccattggtgtatgttagatctccagggggagtttgaagtcagggtattctattcagaagcctttgagatcaaagtgggtgaccagctgccctccttcctggactccacagagcctctgtcagagagccagccctgggctggagagatctctgggaggcctagtaatcatggagctcctggccaaagaatgttttccagggcatattcatgtattagttcctcaattcctcataggatattatgggaaaatagggcgattattacaagccctctttaacagaggagaaaaagccacggggaggtacaatgataacacataatggagtaagtgggcttcaaatcttcatcttctgacctcagtctgggaattttgtggataagagacccacttgctcacactcccagaaggcagttagcaagcagcctgggtatgcaccgtgacataaagattagcagttcattaaacagagttcagtttatcccgaggaatctttacttagcctcccctctatcacttcatttccaggcctcccacctaccttaaggcctgccccgagaaaatttgctctggttttttgtttgtttgtgcaatataacataatgcttgtttgtttttgtaatgtagaataatatttgtttgttttttgcaatgtacaaattaagggcatgaatcctggagccaaactaacttaattccaaatcctgatgctgccccatattaattctgtgaattcgggcaaatgacttagtttgtctaaacctcaattatctcatctataaaaggcagctagatcttaactcactgggttctcgtgaggattaaatgagatagtgcccctaaggtttctggtatgaaggaggcactccttaaatgttcgagacttgccagagggcttcttctctgtctggactgtgctaatgaccacagatccccggttgagaggaatgcccagaccacactcatcctacactcatccctatactcattgtcccttgggaaccaactgcagggaggaggggaaatggccaccactggagggagtacacagcaggccaagacttatgggggactcttccaaattggggccatggaactgtcactatttctactctttattttccttttgtcatccttttgggttcaccgagctatagaataacagagggagatgaatttagcaaatacatcactgaagcttctccctcggaagttgggcccaagcaatgggaatgagaaaggtaaccttggaccgtgggggccatttgatttgatgaccccatccccacttcatttatcagttggccaatgaggcatggcgagtcaggcattgggccaggctctgggtaaagcaatggtggagactcaatgcttgcattggaggagctgtcagtcatttaccagacacagactgggtcctagagagctgaaattactagctcaagtcactgctgtttagtgccagagccagccccagggttccctgcccccacacccagcctaagtctatccctataccacaggcctgaacaactcccccacaatacagtgcctcacttttctttaagaccttttgctttgccaaccttaaccttaagaatccacctccccatcccctgccaaagactggggtgaagaaacgcacctggctacagttacctttctcattcccattgcttgggcccaacttcgggggagaagcttcagagatgtatttgctaaattcaaggattccccactttttgcttttacttccactcactgatagtttcagcttgacgtcaagcctctttgaaaaagaggcttttttttttaagtgaaagaaactttattttgagtaatatacaaaaaaaaaaaagagagagagagagaaagaaaaagaagctgaaaatgagattactcatgatttttaaaatggcctcactgatttttaaaaaatgttcttcctctttcaggactgtttgtggccacatttgcacataggcacaccagccaaaactcatagatcttgtgaattcagagtagcctgaaacatcatcccttataaatttcaaataggcattttgttcatgtcactgagctatgtgtattttaagaacctgctttacttaagatgaggatggcatgaaatgaaaacaaaacagaaacccaagggcttatgggacttttctctgagggtggggctctggtgttggaggtctggtgggggagggggacttgatcccatgccccagagcccctgaaacagtttgggtttcaatgtgtctttcagcaaaatgatgcttcaacacccaggccaggtctctgcctcggaagtgagtgcttctgccatcgtcccctgcctgtcccctcctgggtcactggtgtttgaggattttgctaacctgacgccctttgtcaaggaagagctgaggtttgccatccagaacaagcacctctgccaccggatgtcctctgcgctggaatcagtcactgtcagcgacagacccctcggggtgtccatcacaaaagccgaggtgggttctatcacaggtattcattctttcggcacatgtttcgctcgcagccactgtgtgttgggcatgttctaggcagggggctgttgttgagagtgaaacaaacaaaaccactgccctcagggagcttaccttctcctgggaggagacagaagtacataacatacgtaagtacacgttaagagatgagtgcaaaggagaaaaaagcagggagcggggcagagagaacgggtagggatggggttgctgggtttaaaaacttttcaggccaggcatggtggcccacgcttataatcccagcactttgagaggccaagatgggattatcgcttgagtccaggagtttgagaccagcctgggcaacacaatgaaacccaatctctatgacagtattagctgggcaaggtggtacatggcctatagtctcatctacttgcgaggctgaggtgggaggaccgcttgagcccaggaggttgaggctgcaatgagccgtgatcacctcactgcactccagcctgggtgatggagcaagactcattttgcttttagagacagtgttgctccatcacccaggctggggtgcagtggggtgatcacggctcattgtagcctcagtctcctgggctcaagcgatcctcctgcttcagcctcccaaaacactgggatcacagggatgagccattgcacccagccggggttgctgttttaaattaggaagtcaggtaaggattcactgatagtgacttttgagcagaggtcaaaaggaaaggaagaaggaaagaggagagggaagaagccacgtgggtatctggtaaaagaaattaagggcactgaggtggaagtattggtgcctggtgggctgtgcagtggggcagagtataggggtgggagataaataggggctggtcatattgggtcttacagactattattgtatagatgcagccctgggctcaaagtgaggtgggaaaccacagaaggcttttgagcagagaagcaacaagattcaacacacacacacacacacagatacacacacacacttttttttttgagacagagtcttgttctgtcacccagactggagtgcagtggcatgatcttggctcactgcaacctctgcctcccaggttcaagggattctcatgcctcagtcttccaaatagctgggattacaggtgcccgccacacgtctggctaatttttgaatttttttagtagagacggggtttctccatgttggccaggctggtctcgaactcctgacctcaggtaatccgcccgcctcggcctcccaaagtgctgggattacaggtgtgagccaccacgcccagccttgatttatatttttaaatgatcaccctggctgtcatgttgagaatgggcagtaggggtaagacagaagctgagtgcacagaaaggaggccgtggcaggaatccacgtgagtcagggggcctgcagcaggagggagcagtgcaggtgctgagaagtggttggctttggatctgacttgaaggtaaagctgatttgctgatagattggatgtggggtgtaagagaaagggaagactcaagggtgactgagttttctggccagcatagctgtaagaatggagcgtccatttgctgctgagatttgggattataggggttagggtggtggcaagagcaggaggtctgtcctattctgcagacccctgtggagatgtcaagcaggcagttggatatgtgagtctggagttcagaggacagtctgggctagagataatagagttggaaattatcggcatatagatggcacttaaagccatgagtcaggatgaggccaccttctgtgtccagttgttctgaagaagcttggagcgtggtggtccctgtttttatcactactaggacccaagcacccagacagtagagcaaggaccaggcagcctgccccacccttccctgtagcaatgttcacagccttgggaccaggtgttgctccaggttcacttctgtctgacacacttgcactgttccacgcttggcaaccttgggtaagactcctggaataataaacatggtgagaagtctgggaggcggcttctggcgatgccatagtggcttaaggatgtcagagctgaggttccaccattttattggccttttcctcatggtggcaagtggaagtgtttcaggcttactcaactggcatgattgcagcctttgggcaaggagtagtgggactgacctaaaagactgtcctagttcaccacttgcaggtggcaccccagcatgggccgattaatgccgctttggttgggaatgggcttaggtgccttttctacaggagcatcatgggcttctcccaaatttgggaagctggtgctctgatgctccaggtgaagtcagaggtgaatggggttgcccttgggtcttgaattgaagaagaggccgggagtgggtggctaggtaatgatcctgagatcattcctggttctcaaagaaaggagatgtttaccagacagaatctgtttcggctttaaatgattatagttaataccaatagttatcaatttgcatattatcctcatctcaaaatccaaatgcatttttaaaattggctaacttttaatttactaatatattgccggtataattttaactttgatttttgttgttcactcacgtgtgtgtgtgtgcgtgtgtgtgtgtgtgtgtaggggttttcacacaaaagtctagagctttagtatttcggggtcttttagcgctagcattgcccttgtctgccagcttttgctggcagtaaaaggcagtgtatttgaggtaggtggcatttcttactgccctttaaatgtgtttcttttggattttacaggtagcccctgaagaagatgaaaggaaaaagaggcgacgagaaagaaataagattgcagctgcaaagtgccgaaacaagaagaaggagaagacggagtgcctgcagaaagtgagtgccttctagccttacccttcctctcgctcacgcctgtcttcaccagcttcatgtggctatcagaagaagagttagaaaaccccctacttggttatagtttcccaagaagggccttgtagctggtagcagaaatgccagttgcagaatgaggaggtggcaaagcagttaacacaatggatgtgacggtggatgtataaaaacaggtgtgtgaattcgtctgatgcctgactcccagcagcctcggccggttcatacatgtccatcagcttccaggctgcaggacatgccagcccagttaaagaggcttcacttgactgttttcctgagaaaaggaagctgccagctctcatttggctcactatgaaaagcctttaattaatctcttcaaacaagttatttccttaatccacaagcagtggttacacttgctttgcattcttgtctggttcctaactctagagcccttctccctggcttagccagtaagctgagcccctggctgcgttcagccggcccgcctgagagacactaggggaaatagcttttgtgggcaagcagggtggccggtggtgctcagcagtctttccagtggctgtgtccctcctccaaatgtggacaggccatgacagagtcttagcccaagtcccacagatccccaaaagttctgttgattgcttcaggggatcagtgaaaattagggaattttgtgtgttgctatatacattttttctggggagatgagcttctcattgagatctgtgactcagaatcgactaagccaccataagtctggatttctccccagctcccaaggcccttttgggtccagaagacctgcatatgggctgttgactcatgcaaatgaggtatctgaactgcagcttcagtattagcagagccacaggccgcctctgtggcatcaccagggtttctctgaagaagagggtctgcattttcctaaacccagtgctgctctcccatctcccatcttcctctcgcagcttgatgagccccggtgtgtcccaggtacacccctgcatccaggcagcagcccaggccaccccctcctcactggcccttggctcctttcttgatgcctctgttgcttgtcccccaggagtcggagaagctggaaagtgtgaatgctgaactgaaggctcagattgaggagctcaagaacgagaagcagcatttgatatacatgctcaaccttcatcggcccacgtgtattgtccgggctcagaatgggaggactccagaagatgagagaaacctctttatccaacagataaaagaaggaacattgcagagctaagcagtcgtggtatgggggcgactggggagtcctcattgaatcctcattttatacccaaaaccctgaagccattggagagctgtcttcctgtgtacctctagaatcccagcagcagagaaccatcaaggcgggagggcctgcagtgattcagcaggcccttcccattctgccccagagtgggtcttggaccagggcaagtgcatctttgcctcaactccaggatttaggccttaacacactggccattcttatgttccagatggcccccagctggtgtcctgcccgcctttcatctggattctacaaaaaaccaggatgcccaccgttaggattcaggcagcagtgtctgtacctcgggtgggagggatggggccatctccttcaccgtggctaccattgtcactcgtaggggatgtggagtgagaacagcatttagtgaagttgtgcaacggccagggttgtgctttctagcaaatatgctgttatgtccagaaattgtgtgtgcaagaaaactaggcaatgtactcttccgatgtttgtgtcacacaacactgatgtgacttttatatgctttttctcagatctggtttctaagagttttggggggcggggctgtcaccacgtgcagtatctcaagatattcaggtggccagaagagcttgtcagcaagaggaggacagaattctcccagcgttaacacaaaatccatgggcagcatgatggcaggtcctctgttgcaaactcagttccaaagtcacaggaagaaagcagaaagttcaacttccaaagggttaggactctccactcaatgtcttaggtcaggagttgtgtctaggctggaagagccaaagaatattccattttcctttccttgtggttgaaaaccacagtcagtggagagatgtttggaaaccacagtcagtggagcctgggtggtacccaggctttagcattattggatgtcaatagcattgtttttgtcatgtagctgttttaagaaatctggcccagggtgtttgcagctgtgagaagtcactcacactggccacaaggacgctggctactgtctattaaaattctgatgtttctgtgaaattctcagagtgtttaattgtactcaatggtatcattacaattttctgtaagagaaaatattacttatttatcctagtattcctaacctgtcagaataataaatattggaaccaagacatggtaaa

SEQ ID NO: 347 - DNA, 484 bp, Homo Sapiens
gacaagaagagaaatcctcctctatataggatgctctgctgtttcctaaggattttcagcaccttgccccaaaatcaaaatgatgcttcaacacccaggccaggtctctgcctcggaagtgagtgcttctgccatcgtcccctgcctgtcccctcctgggtcactggtgtttgaggattttgctaacctgacgccctttgtcaaggaagagctgaggtttgccatccagaacaagcacctctgccaccggatgtcctctgcgctggaatcagtcactgtcagcgacagacccctcggggtgtccatcacaaaagccgaggtagcccctgaagaagatgaaaggaaaaagaggcgacgagaaagaaataagattgcagctgcaaagtgccgaaacaagaagaaggagaagacggagtgcctgcagaaactcccaaggcccttttgggtccagaagacctgcatatgggctgttgactcatgcaaa

SEQ ID NO: 348 - protein, 135 aa, Homo Sapiens
MMLQHPGQVSASEVSASAIVPCLSPPGSLVFEDFANLTPFVKEELRFAIQNKHLCHRMSSALESVTVSDRPLGVSITKAEVAPEEDERKKRRRERNKIAAAKCRNKKKEKTECLQKLPRPFWVQKTCIWAVDSCK

SEQ ID NO: 349 - DNA, 1606 bp, Homo Sapiens
gacaagaagagaaatcctcctctatataggatgctctgctgtttcctaaggattttcagcaccttgccccaaaatcaaaatgatgcttcaacacccaggccaggtctctgcctcggaagtgagtgcttctgccatcgtcccctgcctgtcccctcctgggtcactggtgtttgaggattttgctaacctgacgccctttgtcaaggaagagctgaggtttgccatccagaacaagcacctctgccaccggatgtcctctgcgctggaatcagtcactgtcagcgacagacccctcggggtgtccatcacaaaagccgaggtagcccctgaagaagatgaaaggaaaaagaggcgacgagaaagaaataagattgcagctgcaaagtgccgaaacaagaagaaggagaagacggagtgcctgcagaaagagtcggagaagctggaaagtgtgaatgctgaactgaaggctcagattgaggagctcaagaacgagaagcagcatttgatatacatgctcaaccttcatcggcccacgtgtattgtccgggctcagaatgggaggactccagaagatgagagaaacctctttatccaacagataaaagaaggaacattgcagagctaagcagtcgtggtatgggggcgactggggagtcctcattgaatcctcattttatacccaaaaccctgaagccattggagagctgtcttcctgtgtacctctagaatcccagcagcagagaaccatcaaggcgggagggcctgcagtgattcagcaggcccttcccattctgccccagagtgggtcttggaccagggcaagtgcatctttgcctcaactccaggatttaggccttaacacactggccattcttatgttccagatggcccccagctggtgtcctgcccgcctttcatctggattctacaaaaaaccaggatgcccaccgttaggattcaggcagcagtgtctgtacctcgggtgggagggatggggccatctccttcaccgtggctaccattgtcactcgtaggggatgtggagtgagaacagcatttagtgaagttgtgcaacggccagggttgtgctttctagcaaatatgctgttatgtccagaaattgtgtgtgcaagaaaactaggcaatgtactcttccgatgtttgtgtcacacaacactgatgtgacttttatatgctttttctcagatctggtttctaagagttttggggggcggggctgtcaccacgtgcagtatctcaagatattcaggtggccagaagagcttgtcagcaagaggaggacagaattctcccagcgttaacacaaaatccatgggcagcatgatggcaggtcctctgttgcaaactcagttccaaagtcacaggaagaaagcagaaagttcaacttccaaagggttaggactctccactcaatgtcttaggtcaggagttgtgtctaggctggaagagccaaagaatattccattttcctttccttgtggtggtacccaggctttagcattattggatgtcaatagcattgtttttgtcatgtagctgttttaagaaatctggcccagggtgtttgcagctgtgagaagtcact

SEQ ID NO: 350 - protein, 181 aa, Homo Sapiens
MMLQHPGQVSASEVSASAIVPCLSPPGSLVFEDFANLTPFVKEELRFAIQNKHLCHRMSSALESVTVSDRPLGVSITKAEVAPEEDERKKRRRERNKIAAAKCRNKKKEKTECLQKESEKLESVNAELKAQIEELKNEKQHLIYMLNLHRPTCIVRAQNGRTPEDERNLFIQQIKEGTLQS

SEQ ID NO: 351 - DNA, 1825 bp, Homo Sapiens
ttcggccggttctcccgggaagctattaatagcattacgtcagcctgggactggcaacacggagtaaacgaccgcgccgccagcctgagggctataaaaggggtgatgcaacgctctccaagccacagtcgcacgcagccaggcgcgcactgcacagctctcttctctcgccgccgcccgagcgcacccttcagcccgcgcgccggccgtgagtcctcggtgctcgcccgccggccagacaaacagcccgcccgaccccgtcccgaccctggccgccccgagcggagcctggagcaaaatgatgcttcaacacccaggccaggtctctgcctcggaagtgagtgcttctgccatcgtcccctgcctgtcccctcctgggtcactggtgtttgaggattttgctaacctgacgccctttgtcaaggaagagctgaggtttgccatccagaacaagcacctctgccaccggatgtcctctgcgctggaatcagtcactgtcagcgacagacccctcggggtgtccatcacaaaagccgaggtagcccctgaagaagatgaaaggaaaaagaggcgacgagaaagaaataagattgcagctgcaaagtgccgaaacaagaagaaggagaagacggagtgcctgcagaaagagtcggagaagctggaaagtgtgaatgctgaactgaaggctcagattgaggagctcaagaacgagaagcagcatttgatatacatgctcaaccttcatcggcccacgtgtattgtccgggctcagaatgggaggactccagaagatgagagaaacctctttatccaacagataaaagaaggaacattgcagagctaagcagtcgtggtatgggggcgactggggagtcctcattgaatcctcattttatacccaaaaccctgaagccattggagagctgtcttcctgtgtacctctagaatcccagcagcagagaaccatcaaggcgggagggcctgcagtgattcagcaggcccttcccattctgccccagagtgggtcttggaccagggcaagtgcatctttgcctcaactccaggatttaggccttaacacactggccattcttatgttccagatggcccccagctggtgtcctgcccgcctttcatctggattctacaaaaaaccaggatgcccaccgttaggattcaggcagcagtgtctgtacctcgggtgggagggatggggccatctccttcaccgtggctaccattgtcactcgtaggggatgtggagtgagaacagcatttagtgaagttgtgcaacggccagggttgtgctttctagcaaatatgctgttatgtccagaaattgtgtgtgcaagaaaactaggcaatgtactcttccgatgtttgtgtcacacaacactgatgtgacttttatatgctttttctcagatctggtttctaagagttttggggggcggggctgtcaccacgtgcagtatctcaagatattcaggtggccagaagagcttgtcagcaagaggaggacagaattctcccagcgttaacacaaaatccatgggcagcatgatggcaggtcctctgttgcaaactcagttccaaagtcacaggaagaaagcagaaagttcaacttccaaagggttaggactctccactcaatgtcttaggtcaggagttgtgtctaggctggaagagccaaagaatattccattttcctttccttgtggtggtacccaggctttagcattattggatgtcaatagcattgtttttgtcatgtagctgttttaagaaatctggcccagggtgtttgcagctgtgagaagtcact

SEQ ID NO: 352 - protein, 181 aa, Homo Sapiens; identical to SEQ ID NO: 350

SEQ ID NO: 353 - DNA, 2205 bp, Homo Sapiens
ttcggccggttctcccgggaagctattaatagcattacgtcagcctgggactggcaacacggagtaaacgaccgcgccgccagcctgagggctataaaaggggtgatgcaacgctctccaagccacagtcgcacgcagccaggcgcgcactgcacagctctcttctctcgccgccgcccgagcgcacccttcagcccgcgcgccggccgtgagtcctcggtgctcgcccgccggccagacaaacagcccgcccgaccccgtcccgaccctggccgccccgagcggagcctggagcaaaatgatgcttcaacacccaggccaggtctctgcctcggaagtgagtgcttctgccatcgtcccctgcctgtcccctcctgggtcactggtgtttgaggattttgctaacctgacgccctttgtcaaggaagagctgaggtttgccatccagaacaagcacctctgccaccggatgtcctctgcgctggaatcagtcactgtcagcgacagacccctcggggtgtccatcacaaaagccgaggtagcccctgaagaagatgaaaggaaaaagaggcgacgagaaagaaataagattgcagctgcaaagtgccgaaacaagaagaaggagaagacggagtgcctgcacttcagtattagcagagccacaggccgcctctgtggcatcaccagggtttctctgaagaagagggtctgcattttcctaaacccagtgctgctctcccatctcccatcttcctctcgcagcttgatgagccccggtgtgtcccaggagtcggagaagctggaaagtgtgaatgctgaactgaaggctcagattgaggagctcaagaacgagaagcagcatttgatatacatgctcaaccttcatcggcccacgtgtattgtccgggctcagaatgggaggactccagaagatgagagaaacctctttatccaacagataaaagaaggaacattgcagagctaagcagtcgtggtatgggggcgactggggagtcctcattgaatcctcattttatacccaaaaccctgaagccattggagagctgtcttcctgtgtacctctagaatcccagcagcagagaaccatcaaggcgggagggcctgcagtgattcagcaggcccttcccattctgccccagagtgggtcttggaccagggcaagtgcatctttgcctcaactccaggatttaggccttaacacactggccattcttatgttccagatggcccccagctggtgtcctgcccgcctttcatctggattctacaaaaaaccaggatgcccaccgttaggattcaggcagcagtgtctgtacctcgggtgggagggatggggccatctccttcaccgtggctaccattgtcactcgtaggggatgtggagtgagaacagcatttagtgaagttgtgcaacggccagggttgtgctttctagcaaatatgctgttatgtccagaaattgtgtgtgcaagaaaactaggcaatgtactcttccgatgtttgtgtcacacaacactgatgtgacttttatatgctttttctcagatctggtttctaagagttttggggggcggggctgtcaccacgtgcagtatctcaagatattcaggtggccagaagagcttgtcagcaagaggaggacagaattctcccagcgttaacacaaaatccatgggcagcatgatggcaggtcctctgttgcaaactcagttccaaagtcacaggaagaaagcagaaagttcaacttccaaagggttaggactctccactcaatgtcttaggtcaggagttgtgtctaggctggaagagccaaagaatattccattttcctttccttgtggttgaaaaccacagtcagtggagagatgtttggaaaccacagtcagtggagcctgggtggtacccaggctttagcattattggatgtcaatagcattgtttttgtcatgtagctgttttaagaaatctggcccagggtgtttgcagctgtgagaagtcactcacactggccacaaggacgctggctactgtctattaaaattctgatgtttctgtgaaattctcagagtgtttaattgtactcaatggtatcattacaattttctgtaagagaaaatattacttatttatcctagtattcctaacctgtcagaataataaatattggaaccaagacatggtaaa

SEQ ID NO: 354 - protein, 228 aa, Homo Sapiens [sequence omitted]

SEQ ID NO: 355 - DNA, 2064 bp, Homo Sapiens
ttcggccggttctcccgggaagctattaatagcattacgtcagcctgggactggcaacacggagtaaacgaccgcgccgccagcctgagggctataaaaggggtgatgcaacgctctccaagccacagtcgcacgcagccaggcgcgcactgcacagctctcttctctcgccgccgcccgagcgcacccttcagcccgcgcgccggccgtgagtcctcggtgctcgcccgccggccagacaaacagcccgcccgaccccgtcccgaccctggccgccccgagcggagcctggagcaaaatgatgcttcaacacccaggccaggtctctgcctcggaagtgagtgcttctgccatcgtcccctgcctgtcccctcctgggtcactggtgtttgaggattttgctaacctgacgccctttgtcaaggaagagctgaggtttgccatccagaacaagcacctctgccaccggatgtcctctgcgctggaatcagtcactgtcagcgacagacccctcggggtgtccatcacaaaagccgaggtagcccctgaagaagatgaaaggaaaaagaggcgacgagaaagaaataagattgcagctgcaaagtgccgaaacaagaagaaggagaagacggagtgcctgcagaaagagtcggagaagctggaaagtgtgaatgctgaactgaaggctcagattgaggagctcaagaacgagaagcagcatttgatatacatgctcaaccttcatcggcccacgtgtattgtccgggctcagaatgggaggactccagaagatgagagaaacctctttatccaacagataaaagaaggaacattgcagagctaagcagtcgtggtatgggggcgactggggagtcctcattgaatcctcattttatacccaaaaccctgaagccattggagagctgtcttcctgtgtacctctagaatcccagcagcagagaaccatcaaggcgggagggcctgcagtgattcagcaggcccttcccattctgccccagagtgggtcttggaccagggcaagtgcatctttgcctcaactccaggatttaggccttaacacactggccattcttatgttccagatggcccccagctggtgtcctgcccgcctttcatctggattctacaaaaaaccaggatgcccaccgttaggattcaggcagcagtgtctgtacctcgggtgggagggatggggccatctccttcaccgtggctaccattgtcactcgtaggggatgtggagtgagaacagcatttagtgaagttgtgcaacggccagggttgtgctttctagcaaatatgctgttatgtccagaaattgtgtgtgcaagaaaactaggcaatgtactcttccgatgtttgtgtcacacaacactgatgtgacttttatatgctttttctcagatctggtttctaagagttttggggggcggggctgtcaccacgtgcagtatctcaagatattcaggtggccagaagagcttgtcagcaagaggaggacagaattctcccagcgttaacacaaaatccatgggcagcatgatggcaggtcctctgttgcaaactcagttccaaagtcacaggaagaaagcagaaagttcaacttccaaagggttaggactctccactcaatgtcttaggtcaggagttgtgtctaggctggaagagccaaagaatattccattttcctttccttgtggttgaaaaccacagtcagtggagagatgtttggaaaccacagtcagtggagcctgggtggtacccaggctttagcattattggatgtcaatagcattgtttttgtcatgtagctgttttaagaaatctggcccagggtgtttgcagctgtgagaagtcactcacactggccacaaggacgctggctactgtctattaaaattctgatgtttctgtgaaattctcagagtgtttaattgtactcaatggtatcattacaattttctgtaagagaaaatattacttatttatcctagtattcctaacctgtcagaataataaatattggaaccaagacatggtaaa

SEQ ID NO: 356 - protein, 181 aa, Homo Sapiens; identical to SEQ ID NO: 350

SEQ ID NO: 357 - DNA, 2209 bp, Homo Sapiens
ttcggccggttctcccgggaagctattaatagcattacgtcagcctgggactggcaacacggagtaaacgaccgcgccgccagcctgagggctataaaaggggtgatgcaacgctctccaagccacagtcgcacgcagccaggcgcgcactgcacagctctcttctctcgccgccgcccgagcgcacccttcagcccgcgcgccggccgtgagtcctcggtgctcgcccgccggccagacaaacagcccgcccgaccccgtcccgaccctggccgccccgagcggagcctggagcaaaatgatgcttcaacacccaggccaggtctctgcctcggaagtgagtgcttctgccatcgtcccctgcctgtcccctcctgggtcactggtgtttgaggattttgctaacctgacgccctttgtcaaggaagagctgaggtttgccatccagaacaagcacctctgccaccggatgtcctctgcgctggaatcagtcactgtcagcgacagacccctcggggtgtccatcacaaaagccgaggtagcccctgaagaagatgaaaggaaaaagaggcgacgagaaagaaataagattgcagctgcaaagtgccgaaacaagaagaaggagaagacggagtgcctgcagaaacttcagtattagcagagccacaggccgcctctgtggcatcaccagggtttctctgaagaagagggtctgcattttcctaaacccagtgctgctctcccatctcccatcttcctctcgcagcttgatgagccccggtgtgtcccaggagtcggagaagctggaaagtgtgaatgctgaactgaaggctcagattgaggagctcaagaacgagaagcagcatttgatatacatgctcaaccttcatcggcccacgtgtattgtccgggctcagaatgggaggactccagaagatgagagaaacctctttatccaacagataaaagaaggaacattgcagagctaagcagtcgtggtatgggggcgactggggagtcctcattgaatcctcattttatacccaaaaccctgaagccattggagagctgtcttcctgtgtacctctagaatcccagcagcagagaaccatcaaggcgggagggcctgcagtgattcagcaggcccttcccattctgccccagagtgggtcttggaccagggcaagtgcatctttgcctcaactccaggatttaggccttaacacactggccattcttatgttccagatggcccccagctggtgtcctgcccgcctttcatctggattctacaaaaaaccaggatgcccaccgttaggattcaggcagcagtgtctgtacctcgggtgggagggatggggccatctccttcaccgtggctaccattgtcactcgtaggggatgtggagtgagaacagcatttagtgaagttgtgcaacggccagggttgtgctttctagcaaatatgctgttatgtccagaaattgtgtgtgcaagaaaactaggcaatgtactcttccgatgtttgtgtcacacaacactgatgtgacttttatatgctttttctcagatctggtttctaagagttttggggggcggggctgtcaccacgtgcagtatctcaagatattcaggtggccagaagagcttgtcagcaagaggaggacagaattctcccagcgttaacacaaaatccatgggcagcatgatggcaggtcctctgttgcaaactcagttccaaagtcacaggaagaaagcagaaagttcaacttccaaagggttaggactctccactcaatgtcttaggtcaggagttgtgtctaggctggaagagccaaagaatattccattttcctttccttgtggttgaaaaccacagtcagtggagagatgtttggaaaccacagtcagtggagcctgggtggtacccaggctttagcattattggatgtcaatagcattgtttttgtcatgtagctgttttaagaaatctggcccagggtgtttgcagctgtgagaagtcactcacactggccacaaggacgctggctactgtctattaaaattctgatgtttctgtgaaattctcagagtgtttaattgtactcaatggtatcattacaattttctgtaagagaaaatattacttatttatcctagtattcctaacctgtcagaataataaatattggaaccaagacatggtaaa

SEQ ID NO: 358 - protein, 119 aa, Homo Sapiens [sequence omitted]

SEQ ID NO: 359 - DNA, 269815 bp, Mus Musculus
  misc_feature (1)...(269815): n = A,T,C or G
cggaagaatcctggagcctgaggttctggtgggaccctgtgtaatgattcggctccagtaaatgtacagagccctggccaatcctgcgttcgggaacccgggcacaacatctcaggccaggcgctcacccccgcggcctctgacccgcgctgtgctcgcgagtccctcccgggccgcggctcagcgcggcggggtgcagggacgccttctctcccgctcgcccagctctgcacactgcgatccaggtgatttcgcccgcgcgagacagacaggggaaaagccgtgcatcgggggcgcgcgtggagagcaggagggggcgtgggtggtgaggccccgcagggtcagagggcgcgcgggggctggcggcgggcgcgcgtggagctggcggccgtgcaggggcctgtggttgcaaaggctgccacgacttaacctgcgcggagacagggggctggctggggtgccgcagcaggtcgtgggaggctcgccgctgacgtgggggagaaacgcaatagcgtttccgcttcccgtgtccgtgtccgcgtgctggagggcggcgacacaaaggcacggagtcccgggaaccgagaaccctgctgctccctgcaggaagggcgcctacaggccctccccacgcccccacccggcccagctcagagatttctgttttcttcgtggtggtgtgtgtgtgtgtgtgtgttgaaattgggccaacaaacccgtgcagcaaatgtttaaccaccgagccccagttctcagtttaaagatctctttcgctttccagaaactctctggacttagtttccctcatctgttcagtggcaagactgggagacaccagtttttatgcaggctctcctcccccagattcaacagctattggccgcttttagatcagggccttctacgtgtggggactgacagcgttatgcagtgtgtctgctccgttcagtgtggtgttctattatgtagagctgagcatctgctccagtgccacaggacgcggctcagggaaagctttgaagggctgtgcgctttcactcagggtctagaagtccattctttctggcttctattcttcatgttccgacttccctgtgatttctctccccgtaggatggtttatgtgctggctaaggacagttctgatggatgtgttgttttgacagcaccccagaaagacaagctgtgttctccaagacccttcaaggccaccagcaccaatgaattgtctatgctaggggctggggtttggagccttctttggggacaaaggctttacctggtttttacttggctttctcttggagagtcaccagctgaaggtgaggtcaaggccctggttggcagttggcaagatctcctggtgatcccaggtcagtgtggcccaagggcaggggtgccatactttggggcctcagagaaataaaattcttggttcttgcagaacttgctacgggcctttttggaggcttttaaaaaggtgtggaaagaactcaggatggggctgcttggaagcagggggccaagaggtcaaggcagccattgctacatgagaccctgtcccaagaaacaaaaccaaatttaaaaataagtaaaagtcacaaaaatacagggattataaataatactgaaacaaagttatcaaaacgccatgaaagctcagatttgtataatgttctattgcaggatatttgatcataactctcataagaaagaggagaaagagggcagggggagagagaggggggagggagggaggaaggaagagagagagagaaggtagtagtttaagttatcttttttatccttttgatcaaaatgccccaggataagcagtttcagggagaagggtttattccttgtgcaggttaggggtttattctcttagtgggaaggagacaggaggctgctggtcacattatatttatagtcaggagacagaatgaacaggaagtgtggcctgactataaacctcaatgtccgatcccggtgacccaccaggctccacctcctaaaggttccccaaccttcccaaacagggtcaccagtctggcaccagatgttcaaacaacgagtctgtggggaacatttcttatccaaccttaacgctagtgtcagggaaagaaaaggagtttagtttagccaaactgagatgtcctgaggatgctctagggagccagccacattatattggtgtatttaaaaattgagaagaaatttcctaggttttcaaatgaacagtcaagacacgaggactggaagagttgagtagtcctgagaaactgagtgtagcttaaagtccttttccaggccagctggcttcacagtgaaatctgccaaacatttaaaaaataattaagaaaggagaggggccactacttggttgtttatgaggaggctatagcattgctgtgaaacttgacgggaaactgtgtaggacctaaagtcggtaaagaaagatacaaatgatacaaaacaattaagccttcagcgctggtttactccaggcaagtaaactttgttcatatcaggaaggaataaactattaaaatccaactgttgagtaaaggagaaaaaatattaggtaagtcatgtgtctatgcgcagtacagactttttttgtttgtttgtttttgttttttgagacagggtttctctgtgtagccctggacgtcctggaactcactttgtagaccaggctggcctcgaactcagaaatccacctgtctctgcctcccaagtgctgggattaaaggcgtgcgccaccaccgcccggctcagtacagacttttgacaggggctgtggctgtgactcgttggtagtgtgcttgctgaacacacactgagccctgggttccatcctcagcactgtataaacagggcatggtggcttgcgtctcttattctagcactgccgaaattcaaaatcaagctatgttacagcataggaggctgcctgggtaacaggagatatggtttaaaaacaaacaagcaaaacaaaacaaacaaaaaaatgagcttttaggggagggaaattaaagaagatttacaataatggaagatatatcattgctttttgagccacagagtcagttagaattcaatcttggaatgattgtggtggctcatgcctttacgcctggcattctggaggcagagtcaggaggatctctgtgttccaggccagtctgatcttatctgtatagcaagttccagccagggcagggttacatcaccattaaaaagaaaaaggtcaaaacccaggagattgtttattggctaagtactcgggggccctagataccttgttagtatggagaactctaggctctgtactatgtgacctgttgtcatggtcctattagtgaggtgtagtggttacatgctccaggacaggtatctggtcaggagctagtttgaactcctacctttctcaattatgagttttatgggggttctgaacttgctacaaccttaccagttcttctgtctggtgacacggtccactgccccacactgaccgtgctgttaagtgaagctcaaaactggacataggtgagctgtggaggcagagattggactggggtcagttctggtgcagttagtaacaaggataggagagaagggggttctgggacgtgttggtttcatcacagcggtaattactttgctgagtgtcattagtgtgttgttagaaatattgatggacacatttgtgccttttcatagtgacagaatttattaagtaatggtaaattcacaaccactaccatttttacttgctgcaattcgccacgtagttacggtttcccttgttagctggttttagtcaagcatagattctttcattcccatcttaattactgatgtaatcctcagatcacacattacatatcacatagtaaattagtcagtccatcagtcagtctgtctgttaggttctggatggggtaggtagttcaagaaaacacagattactaggaactaaggagtttattaggagagatattaatgtcatgagcagccagagaggcagcaagggggattcaggacccagccaaagagacaggctggcaggaagagattcagagtccacgtggcagaggagagcctcttcttagtgctttgaaggcggggagagtttcacagcaagagccagcagccagaccctgtcttcgtacagtggtctactgtctatgtatgtttgtatgtaggctacaaaatatttacaaacggttaaggcagctgccgcagaagtccacagcccttcagagagaccttactgcgggtgagcagaagactaaagggattgcaaggagcacctgaactcagctcctggaggtgcagctgcagagctgggctgcagaagtgagggtggaggccttggaggtgaagagcagagccagctccagacagatgggaggaggacaggtggacagtcagcaatttcagtggctacctgaggacagagccaagcctctgtggtgtgtggtgactacggctggggaggtaacaggctgatggagcaattgacacggcagtattagagagcctctttaaccgagcccagttgaggggatgcacccctgtctctgtctggtgtacttgggaagttcttggtctgattttcctgatatgattttaatatgctaatgtgaccccagtgtactttgataaaggtacagggtggcaccctttctgcctttagaaataagttatccgtccgtgccaagcactggccaaatggtagcacttatgggcacaacacagggccatccttctctaatagagttaaagctgcttataaaatggagtctcaggacgaggcaacaccctgggaaacattgtaacttagggcagagtacatccctaccacaacagccagtccatgtcttaaaagcctgcattttaaaaagcatacttcaataaaaaattatgtaaagtgttccgctgtaagagacacttgactcattcagatttccctaatctaggagtctgaaatacagagggtgcattattgttgattaaaaaactgtaagataggttgagaattgtcaaggggggaaacgcaatatcagatcattattttctgttgaactagggacttgaaaaagttgatttctttttgctggtctttaacactcatataaaaagacttagggtcatgtttggtgagaggattgctggtggtatgccgcacaagccagagaatgctaaactgaggaccgagcataaaaatttgcttttggattaatattcttcccgcttgatttaaaaaaaaaatacattataacaattggattaaaaagattttgcttcaggggctggagaggtggctcagtggttaagagcaaacacagctcttccagaggaccagagttgggtcccctgcttttctctcaggtgcctttacctgcctgcagctccagctcccaaagccccacccccacctccactgccatgttgtagaaaagatccagtcaccctgctgggggaacactgcccacatgaggcaggagtctgctaacgcagaaagccagaatcgccctccaccatcggctgagcgactctagtcatgcaggtgaccccagggtggtgatgtcagctgaagccatactgccctcaagtatgtcctgagaaagatccagccttctcttcaaactggcatgtcctgttgcaggttcagaagtctccagtttgtgttaaaagactttctgctgagtcctggagtcacctccagttggtccatccccccttgcatgtcctggtggcattaggtttagagaagggacttccctttataggatgtggccagaagacctgttggaagggtcaccatgagtctggacttagttttctagggggagggaaccatgttatttgtattctgcaaacagaactgcaaatggttccatccagttggatcctcagaagaagctgaggcccggagttggtccactcactgaccccccttgaagctgtgattgtccctgcagtatgcagccgtgtattctcattgtagtggtttctggagtgcgctcacctttcctgaacttagaactcagaatatttctgttctacgcagccttgctgtctacggcccaccaactctctgacatacgagttagcatggtttattcagccttcttcactcgtctctgaaggaatgtagctgaggtagacattcatgtgtattttaattacatctacttggctttcaactttccttaggaagtatttaaaattatacctacgtttaagtttatttacatttagatggtttacaccatcttttatcattctgacagacctatttcattataaggaaaaaaattactgagggaaggtcagagagacaggttgatgtgtctgagtccaagctctgctgctaagctgtgtggctctaggcaagtttcctgaccttgctgagccctggtttcccctgcagtagatggtgacgccctcaaagctataattgtgactagaacaagtactctttcaggacagtgaatatgcaaagtgttcttttcaggttagaactactgagaaacagtagggaagccacataaaggaacctcttcactttagaaatgaagggagatggctcactttgtgaaatgcttgccacacaagcttgaggcctgagtccagccaggcatagtgggatgtgcccgaaatcccaggactggggaggtggagacccctgaggcttactgccagttagtcacattgcgaagctttaggtttagtgaaagatgctgttccaaaaatctaaggagagtaatggaggaagacacccagtgataccctctgacctctgcatgagggtgtgcacaaagctactcataagatgaaaacacacacacacacacacacacacacacacacacacacaccagagaagaatgagaagacgtggcagttctccagtttgtgcctgagattcttgtcctgtgggtctctttgatattatgaacccaaaatactttaaaaacagtatcaaccctgggtctcttctttccaatatgtaatacaaaatcaatttcctgtctgtttctcccatctgtcaacattacaagttgggactctggtcctgagctttggacttgcccgttcgtttatgtttaatgcccagcccacggctgaggcctggattagtttgctggtagaacttaattctctgacatccttcatataattaaatattcagtggctctctcttatcatgtaggcctctcttacctgtgtgcaactgtgatccaggaatcttaaatgtactttaattaaaaaaattaaattgttctttcatgaaatttgacacaaattgttaaattgtttaccattctgcctggtgtgtaaaggcccaccagccccactgaagagagggcatagcttctccattgtgcccacacatctgccacacacacccctccacacacacaccctgccacgcccatcctatagtaggcttgtccctagattaaccatcgcagctccagggtgcttgtgttaagtaacattaacaatggcctcaaagcacaagactggaaaatcagacatgcggcagatcagcctcacagtgtttgctttagttttcaagctgaaagctcctaataaggaaagaaaaagactcagatgggagctgctgagatctacggttaaaaacattttctattcatgaaattatgaagagggggaaaattaagtctgtgctcttatgtttcacactgcagaagtcccagccactgtgcatgtatgtgcacagcagaaatcccaactactgtgtatacatgtgctcaacaaaagtcccagccattgtacatacatgtgttcagcagaagtcccagccattgggcatgtagacacatagctactatgagaaagaccttcctccatctgtggctatctagacaggatatgatagaacaaatgatcctgactgaaaatagtttgacttagaattctttgagtggtgttgagagggtatttttagcttgggtttagtgggatgcagtgccctctaaaaccagggttgcctgggtacagaaggttctgtaccatctgcagttgcaggcaagcactgagtgggcgttggtttcgtttcctattgatgtgatagaatactctgacaagcaatttaaggaagagcgtttttcttggctcaccatttgagggcatggtctattgtacaggaaagtggtagctccaagaccatttacatgctgttcaaggagtggggggcctgggctgagcatgggaaaaggaagaagagtggccccaaagaagacttgagggctgccgactgctggaggagaagaggagcaggtgggggtggctgtggtcaggttagctgcttttagttggatttcttccactcagggcctcagccaggtaggctaatgatgcattaaatcaccaactagtagctgccaatgtctctagagtgcttagggctggccctgggctaagtagttttcatctaacccatccaccagccccatgggcatctgggagctggctactttcgcatgtgtggttcaatcagcccatggctgagttctgagttcctctgtgcccttgggtggaagctgtggggaccagatccagattttaggtgtgctgggggagacaatgctactgctttcctgataattattaatgctatgcatgcgtgcatatgatcacctcgtgtataatacagctgagactgcagcaaaaagaaatgttataaaaacgagtccttcacaggtaaatccttcacatagaggcattgctcaagatagagggatctttgaacaagcagggcttctagaaatttcccaaaacgcacaaggttatttatgttcagattacagaagcattttttaggaacactttacaattacaattcttcatgagaggagacagacatctagtgcagcctccgtcttctgtgacaggagataggctaaaacaccaagaaaacttcccttctactcttgaaaagatggcctctctgtttatacagaattccagaaacccgttctaggagctagatggcaggggtgaaacagggagaagtgtaggaagtcaggatcctccagagagcagaagctgtcactcatgggagaaaccagacccctgtcctggacaaggtctcaatctttaggagaaagggtcccaaaggcaggcaacagagtcctagacagcccctgctcccactgttgggagtctcacatgaagaccaagctacacaagtgctacatatgtgcagagggtctaggtccatccatgcttgctctctggttggtggttcagcctctgtcagctccatcggcccaggttagttggttctgtaggtttttaagtggtgtccttgatccctctggctccttcaatccttcatcctggtcttctgaaggattccttaagctccaccttacatctggctgtgggtgtttgcatctgtttctgtcagttggtggtaaggtctctctggtgacagctatgccaggctcttgtctgctcatatagcagagtatcattaatagtgtcaggggtggcctgtctcatggcatgggtctcaagctgggccaatcattggttggccgttctctctatttatgctccatctttattcctgtgcattttgtaggcaggacaaattgtggattgaaggttttgtgtaggtctgggttgatgtcccagtccctccaatggaagtcttgcttggttacaggaggtagctgtttcaggttccatattccccattgctaggagtcttaactagggcatcctcataggtttctgggagtttacattgtcctagatttctaggatccagaaatgcttcccacttgattccaattgtgtctcccagtactctctccctctgtcgtccccccatttgatccctcctgttcccatccccaccctctcccccacccacttctctcccaccatctaccttgatgtctgttcccttctcagtgagattcaggcacatccctccttgggccctccttgtcacctagcttctttgggtctgtggagtgtagcatggctattctatactttatgcctagtatccatttataagtgagtacgtcccatgtttgtctttctggtcaggggtacctcattcaggatgagcttttctggttccatccatttgcctgcagatttcgtgttgtttttgtttttgacagctgagtagtattccgttatgtaaatcaaccacattttctttttcagtcaaggaccatctagattgtttccagtttctggcaattatgaataaagctactatgaacatagttgagcaactgtccatgtggcatagtgggacatcttttggttttatgcccaggagtggtatagctgggtcttgaggtagaactattcccaattttctgagaaactgccaaattgacttccaaagtggttgcacaagtttgcactcccaccagcaatggaggggtgctcccctttgctccgcatcctcaccagcatgagcagtcttagccattctgagagatgtgaggtggaatctcagagttgttttgatttgcatttccatgatgactatggatgctggacatttctttcagtgcctctcagacttttcttgtggcagtttagctaggtgtggtcagaacagctttgggttgaggtcatctgtagagtcagggactggcacccttctacattgttgtccatgtaggtttcaccaattctggtcagcatgaaagggtggaaaccaggagaccacccatgggcttacccttctccacaggctcaccctcccatactcatgaggcagatatgcatggcatcatgtgtggaatttagtgtttatgtgtccagattaaaatccagttcctttgtgagaaaggaggctgagtgtgtgtaggagaagcaagaaagggaagaggaggagagggaggaggaagaagaggaggaggaagaggaggaggaagaggaagaggagagggaggaggaagaagaggaggaggaagaggaggaaaggggttacctgtgctttgcagctactctgcctttcaaagacattggtattcatggaaaacatggctaccctttattgctacatcccaggcaaagtgcttagtgctgtggccttggaaatcatgttccttattttttatggggggggggataagtgtgcccacaagaaaatggagttcttggatgcattttatgataaatctagggaaaggttggcaagtggggagtgtgcgtgcttgtgtgtgtatgtatgtatgagtgtgtatgcatccaggaacagggttttgggttggtgttatgtcagtgtcaccctgaaatgtgaagggtccttgggagcgccagctagctcagttgacatcaagaggccaatgtgcagtgttactttagcaacatttttgtctgtctctctcctagaaactctccacactacactgggaagcagagactccagctatgctgcccgggtgggaactgactctctgcctgcttgtttccttgggtttccacttccgctctttctatgaagtttacaaagtctccagaggtaaggctccacgattttctgatgacctgtcaatgaggaagtaggtgggagtgtctgcgatggacaatttgagaggacagtcctgtggcagtgtgactcgtgctgggctgtgcctcccacacgcatgcagtgtgaatccacgatgggagcccgggattgtctctcctgctctttcacatgagctggtggcttgttttccaacagctgctgctgctgctgctgctgctgctgctgctgctgctgctgctcctcctcctcctcctcctcctccttctttcttcttcttcttcaagatttatttattactatacataagtccactgttagcaggtaagagcagtcagggctcttacctgctgagccatctcgccagccctgctgcttttcttcttgatgctgggcagggaacctctgagcacaggacctgccactgagcagtgtccccagcccatgacaacagtaggaacatttgatttacttctcttgaaggccatgtaaaagaatttgcactgaggagtcaaagtagattcaaagtttcctttaaacatccttctttgcaggcttatgtcagacacatgaggctgacagtgtgagtcgctcacgccccttttgtttctttctctgtgtttttcatcttgctgtgctgcccaagctaaccccaggccaggctttcctgcttcagccttctgagtagctgggattacggagagtaccaccaggccccactcacatagtttaatatttaatattttcctggtctgggaactgaacctggggtcttgtagcacatgctagaaagtagtctaaccctgagctacttccccaaaccctcctcttttgctttttattttgagacaggatcttcctaagtttcccacactgggtgtgaaattacttggtagcccaggttggctttgaactcacagcagtcttctttcctgctttggcttcctgagtaatgggattacaggtagagccaccatacagacggagctgctgagctggactgagggaggaacaggagctgggctggggagatgactcagtaggtagagcgcttgcctggtatggctgatcacctgggtttggttaccagaactcacagaaaggtagacggagagaaccaactcctgacttctgtatgcacaccatgctgcacatgtgcatgcaatacacgatagtaataataataataataataataataataataataattagggattagagctatccaagtagcaaagaacgctgagaccgtgtgccagagatagggttgcaggctgtagacaagcttgttctctgcccctgggatgtgagagaacatagcatgatcagagccacaaatcactcagcagaactgggatgcaaagcatgatgggagaactgaccttggactgaagaacaggtgttggggtgtgacagctgttaaaagtccattgagagatttgggctctgtcttttaaaaatatatatactttctaatttttattttatgtgcatgagtgttttgcctgcataacatgcttggtacccacagaggccagaagagtgtgttggatcccttggaacgggagttatagatggctgtgagctgccatgcaggtgctgagaatcgaacccaggtcttctggatgagcagccagtgctcttgaccacagagccatctctccagcctctagacttttcccttacagcagaggggaatgtgaggaaagttgatatttacaacggcaaaggcaggcgatagggttgtagcttagtagtttagtacctgtcaggccctggcttgcatcctaggaccataataaaatacaatagcaaataggttctgggcagcgtatgctatccctgcagctctccagggttaatcttgctgccagtcaccatgttggccattcagaggagctgagaactttggtgggaactgaccaggtaacttccctcttttctgaaaccttgagttttcagagtcagtgtagaaggggctctgagtctggcttcactctgggtcctttcctcttgtctcacggactctttgtctcaatgtagtgagagtatcgctcagaagacaggcctcacagcagaattaccgtacccatgataaccaggtccctggagtctagacagcatgagatgttgttcttcggccagagcctcagaggtcctctgaagtggtcctgcctcctgtgaggtttttgcccagcaggaaagatggaagagaaagggggttactgtctcctttctaacacacaaccaaagtcactttcatcatatttgctcacaatcagttctccctggagccacagaggctgagggaggcacttggggaggttgtcttggtggggatccatttacctagcacaccaaggcatgctattggagcagaagaaagcaaagatagatttttgtcagccagctagtgtcttccctacatggctgcattttatcatcaagccagtcttttccatagatggctgtctgtctccctcagcttccactatatgataagctctctctctcggagttttgtgatttaaaaataataactgccattttttataactcattcttgcgtgaaacttttctcctctgggaaggttttggctttgtcgtagttttaggttaggggtaaagctgagtggtgcatagaagcttcctaacatctgagttcaggacgcgccactttctgttcatgtccagcacctcgggggtgggtttgtccagtgcagtctgtttagcacagcattgttggccaatgtcctcagctcacatcagagctccaaccggggtagtacatactttgttgatttgaaaagtgtgtactgacatacgtccataattagagtatgacacagcagttcgtcccctcaaaaggctctgtcctgccagcttgtctttcttcttacccacaaacccctggtcctttttactgtcacaatgttctgcttttcctagaatgttgtatagctggagttttgtggtctatacctttttagcatggcttctttcctctagggagaagcatcgagggggctgcgatgtgtttttcatagctcatcagctcatctttctctcccgccttgtcttcccttctcttggagacaggtcacacatagggttaggctgtctttgaattttttatgtagctgaggctgaccttgaacttgtgatgtttatgcttccacctcctgagtgttgggatcggatgagggctaccacttccagttaatgcagtgctggggattgagcctgggtgtttgtgtgtgttaggttacaattctgagcgaggggcagtatcctgctgactgcacacactgcattcgagtcatccatccaccactgaaggcattgtagccacttccaagtgttggcagctgcatgcaaagcctgtagaaacagttgtgtgcaggcttttatacgacagctttttaccttacctgtgtactaagcaatgtcattgctgggtcctgtggcacgtgttttatttttgtaaagaactgcccagctgttcagctttgcatcgtgtgactcaggggaggtgggagcacttacccagacaggagaaaaaaaataatccttaccatgcatcacccagagttttttctttgtttttggacaaagtctcactgtatagcacaaactggcttcaaatccatggtaatcttccggcttcatctctatgctacaccatgcctggcctaccatgcgtctgaaggcttgcttaatgagccttgagttaatgcctttccctaaaagaggccatctgtgtttgtggctgtgtcagtgtaatgtaagacgttctgaagacgagagtcaccagttgtcactagcaacaactgttggtggcaggcagacactgtggaagcgcctgtcttctgactgttccctgcttgctgttcatgcgtaggctttctggttcttgtgtccactttgagggtttgtggtgttctgggaatctgtctgttttgtggagtgcttcggtgcagcgtatctcgctgtgtgattttatgtttgtgtctcctttatctttcccatctctgagaattaaacagttttacttctactgttctccctcattcctggccccgcccctcaccttactgtatatttatttctgtctctctttccctacctctcttgttccattttcccacacgcccctcgacagtgtcttttcctttctttgatcagctgtgccggagcgcctgtgaatctcagctttcggctttgttagagcactccgttgttctgtcacgcttcccagctcatcgatgtctgaacggatcatttctgtctttgttgttcctcgggcttgggtagttcctttttgtaccagcttcatgggttgaagtgttagctcattcgtttcctaagcaatgtgtttgtatcattgcgctgtatctgactgacttttctcaggattccagaatggaaattgtaaactggaactatactgatgtatttcaggtttcaaaaaaattattggctggtgcaaggccccaggggttaaaagtttttgttgctctatcataagaccctgctttggttcctagcaaccgtatctggtgccctgcaactgtctgtaactccagttccagggatccaaagacctcttctggccttcaagggcacctgcatgctcatggtacacataaactcatgtagttacacacacacacacacacacactctaaaaaatatatatatatattttgtctgtttgaaccagggtcttgtgcagccctgaatggccccaaacttgctatgtacggcttggagctccccatcttccagttgtcacctccctagtgctggatgacagatacgtttcaccatgcctagtttctctttctttttctggggactgagcccagggcttgatatggactgagccaaccaaatgatacacaaataccaaatgagtaccaagtgagtataccaagtgagacacacctccgtctggtttttgtggttttgagacagggttcttctatatagcccaggatgaccttgaactgcagaccatcctcatgagttcagtggcaaaataaacaaatacataaataaataattcatttttaaaaagctgaaggtttgtaatcttaggtgggggttaggggtgggggtggtgtgagggactgaggtggagggtggaggagtcgggtaggtgggtggagatatagacaggcagatacccagggattgctggtccactagtctaacctgtttgacaagttccagtccagtgagagaccttgtttcaaaacataaggtggacagtgtccctgagggacatcaaccaaggttgtcctctgatctctacatacaaatatatacactctcgtgtacacacacacacacacacacacacacacacacacgcacacacgcacaaagacataaaaaaaaaacactaccaataatgagtgttgggttgtgttcccttgcagtacctcatcagacgagagatgattttctctttttgacctgctaatgatatttttattttaagggaataaagttttcaggagcaaccacagtgacttctgctgtgtaccttccctggccatggtattttatcaacctcttttctctgaattgaaaagacaatcagtttctgagtgtgcctggtcagacctcggttttatccttggagattccaacatggcaccgagactctttcgtataccatgggccccttcctttcttgtaaaccatgtaactggtgcctgaagtctctgtcgcttgctttcactctcttgcaagcttgtggctacccaagttcccttcgaagcaagattcctcgaaaagttcccaagtgtttctgggctattagcatatttacctttgtctttttaaggcagtgtgatgataatatttttcaaggttcctgagcttttcggatgtgtcgaccacactccagagtcaaatactgcatgtaccttatgtccctgtcttaagaaattgttcagatttatccatttagcagatttattttctttctcaaagaacaaagtttggcagcttttctgttttctgtgataatcactttctaatgaaagtagccatgtgggatcctgctgacccaatagtctgcaagcatgcctttctgcagaagttgcctgttactgacatttgcataaatggacttctgccttctgtagatttgaggtttcaggtcacctacttccccttctttagctgtcagtgaactgttgctaatgtctttgtaaacgagtgctaacacccggggatctaaaaacagctttcctggtgcagagtttctgtctgacttgccacctctcatttctttgttattatgtagcagttgtctccagagtaggatacagctgtagcgaacacgcttgccccacgctttcactttcccctgttagccctgcaggcacagccattaataatctgggtctatgagagcatgacacagcagcggttgtaataatgagagcttgacacagcagcagttgttaagtgggccttttcctttacatggttcatgcaatgcatcaacctctcacaggacaagggctgggtgaaaaggcaagtactaactgttgcaattgaggatttgtttgcaagtgggttggtgactttagagagcttattctaccatgtgggtgggggaggcaagggatcctgtccttgaacaggtggccttgcctagggagcttgctgagggtgagaggggccactgaggggactttggtgataggacttgagtgcctcgctctgcaggttgccaaggattgaatctgtctcccagtgtccttacatcaaagcttccagtgtgtcagatggcacttgaccaagtccttgtcactcacaaaactactgagtcactgccttcctccagggataccagatctcttagcccagcccctttcaggcttgctttgttattgccttctgtgttggttattgtccttacagaacttttcaccaatcacagcaacgtggtggttgagaaaacaggcaatgatgtggagtgtcttcctcattccctacctgctttattgctttgagacagggtctctcactgattagtctaagctagctgctctgcagccttggagattctccagtttccacctctccgggactgggtttatagatgtgtgctgctgtactaggcttttcctgtttgtcctggggatctgaactcaagactccatgagcacatgagacttcatggtacagtgagcactctactaatgatgccatctccccatgcccctctgcccagaacatggctctatcagcaattggcttaagttcagagttcaggaggcttggtctgcttgggaggtcttcctgaccttggttattttgcatcctatttacagatctcatgtgtttttattgagttatttgtgacccacattctcattctctgagagaattggaggaagaaagaagaggttgaagccctgggtctcaaaagtcatggaaaacctatcctaccatgtatgtctctgctgtagcatagtctgcttatgaggtttttttaataataataataataataaatttatttgccagaatatgatgatacaggtatgccattttctttttttttatttattaggtattttcttcatttacatttccaatgctatcccaaaagtctcccatacatcccccactcccctacccacccactcccacttcttggccctggcgttcccctgtactgaggcatataaagtttgcaagaccaaggggcctctctttccaatgatggccgactaggccatcttctgatacatatgcagctagaaacacgagctctggggcgggggggggcgtactggttagttcatattgttgttctacctatagggttgcagacccctttagctccttgggtactttctctagctcctccattgggggccctgtgatccatccaatagctgactgtgagcatccacttctgtgtttgctaagccctggcatagcctcacaagagacagctatatcagggtcttttcagcaaaatcttgcaggtataagcaatggtgtcagcatttggaggctgattatgggatggatccctgggtatggcagtctgtagatggtccatcctttcatctcagctccaaactttatctctgtaactccttccatgggtgttttgttcccaattctaagaaggggcaaagtgtccacactttggtcttcgttcttcttgagtttcatgtgttttgcaaattgtatcttgtatcttgggtattctaagtttctgggctaatatccacttatcagtgagtacatatcatgtgagttcttttgtgattgggttacctcactcaggatgatgccctccaggtccatccatttgcctaggaatttcatgaattcattgtttttaatagctgagtagtactccattgtgtaaatgtaccacattttctgtatccattcctctgttgaggggcatctaggttctttccagcttctggctattataaataaggctgctatgaacatagtggagcatgtgtccttcttaccagttggagcatcttctggatacatgcccaggaaaggtattgtgggatcctccggtagtactatgtccacttttctgaggaaccgccagactgatttccagagtggttgtacaagcttgcaatcccaccaacaatggaggagtgttcctctttctccacatcctcgccagcatctgctgtcacctgaatgtttgatcttagccattctgactggtgtgaggtggaatctcagggttgcttatgagtttttgaacattgcttgccactgagtttttttgatagaagcccatattttctgttcccttccaagttttcatttattgccacagtctgcggtagacctctggctcagtgagagctgattggagtttttccaaatacatcaaacatcagggcgtgtgtgtgtgtttgtatgtatgtatgtatatgtatatgtgtgtatatgtgtgtatatatatgtatatgtgttatgtatgtatgtatgtatgtgtgtatgtgtgtgcatatatgtatttatgtgtgtatgtatttgtgtgtatatgtatgtatatgtgtacgcgtgtatatatgtatgtgtatgtatgtgtgtatgtatgtgtgtgtatgggtgggtgtctaatgacatctaaggacccgctccagaactattactcgtatttataagatcaaagtgtaaggttagtgattctgagtaaatgacttaaacaacagctcattggcagcgattaaaatgcaaatcttgccttcagtaggtagatgggaatttgatgtagccttttgtgaagggagagaataaacagctgactggtaatcagggctcttgggtggaaactgctctatttctaatgttctcagactgtggtttggaaaatggaactgggccttggcagagagagttgtcttggctgcaggtccccagtggcatggggggggggggggcgcttctaggctctgtccccagtgacatgggggtttccaggctcggtccccagtggtgttgggtggaggactcccaggctccatttttagcgtcatgggaggagttctagccagaggggcttctgtccttttatattagctacttgcttagctacatttgaatcacagaaacaggctgtcaaaaagagtgaggtgtgggctccctgcagcaaggtgtcctctcagagtcctgaggagtgatgctcgtcatagacagatgtcttgcagcaggtcctcagcatctgttctttattgagcgacacgatactgcagctgtgagcttttagctaattttaggttgtctggatggtggctcatgtctgtaatcccaacacttgggaggctgaggtgggggttgctgtgcatgtgagactcagagtgatatctcagtcctcattgctaccatggagagcactcagccataagagaaccaccttctccttttttgctgtcttgtttggagataaggcctcaactttgttccatatggttttgttatgtatatgcacagtagttttctggtattgtttacctataagtgtgcttactattcagaaatgattcttttttttttttttaaataacacctgtcagctcctatcatatggttcagtaatgccacactagttttgagtcatgatctcagtaaaatattccatacccgtacagcctcacgtgttgggattatagacaggagccagtcctcaagacagtctaaaaattagctaaaagctctcagctgcaatgagttgttcaataagaagcagatgctgagagacggccattggataactgtccatgaggagtgacaactttaggactctttgaggactcctggccttctgggagcctacactctattcttcagacagcttgtttctagacagctggaccttgcaacaacctttccagactccctgtgttgaacatttttctctcataattttctccctctccctttgtggtctttatccaaactgagagggatatttacatcagccctattttgtattctctggaacttaggtcccaacatagggaaggaatttcagggatgtgtggcaggtgtgcctgctactagatctgtaggacatttttcttttctttttaaaaaaatcttctttgggtgcttctgctatttatatctaatttagttgggcatgattaataaaggatttttcttcttctttttttcttgtcagagcatgaagaggaactggatcaagaatttgagctggagatggacactctatttggaggactgaagaaggtaaagggtagccgtctactatgtagaacgtgccagtgtttcacctcactctgtgggatgggagagtgtgtggaggcccgtctggagcagtgcgcttttctgttgagaaggtgaagtgtgttgtgttggacaatgaaccagactcgtgttctgttctcttctggaagtgctgggcggggggcgggggtaccagccccactcagccccactttttccactggagagatgctaggtaccccttttctccaaccaagacctctgccttagtcaccgttctattgctgtgaacagacaccatgaccaaggcaattcttacaaaggaacacatttaattggggctggcttacaggttcagaggttcagtccattatcatcatagtggggagcatggtggcatccaggcaaagatccaggtgcgcagaggtagctgaacattctatatcccaatccataggcagagacagacagacagacagacagacagacagagagacagacagactgtgcttggtatgagcttttgagacatcaaagccccaaccctagttacatacttcctccaacaaggccacacctcctaatcctaagagtggccctccctggttactaagcttgtggggaccgtttttattcaagccaccacagcctccttcccttgtcttctgtcccatcagtccatcagtgacctaagaccccatgacaatgttgacttggatggtggggggggggtcagggcagctgatgatgggattgaaagtgcttctgggtggtacatccatgtttctgttgtcagtatttaagaatatcatcaggccctgcattacctttactctgagtgtgcagtgttcccatcctgggaccagttgctctcaggggctggtttggggcataaaacagcacatcagctcctgaacgccctacttcctcacaagtgtttgaagacactcatgtctgccctgtcctgactgtgcctggggagcttcaggctctagactggcagcagctttacttcagttcccatcctgactcactaggctgtgcagaggcacagttagatgtcaggccagtgtttgtcagggactaggaggtgtgtctagccctgtgtggggagtcctttctggcatttgttgctctacccactggacagttccatgaacatcagatgtgggctggggagataggtcggccagtaaagtgattgtcattcaaacatggggatctgagtcaattccttagaatctatgaaaaaagctgagtacagggctggtaagatggctcagtaggtaaaggccttgctgccaggcctaatgactgtagttcaggcacaagaacccacaggaaggaagaaactgactcctgcaagctgtcctctgacttctatatgtgtgctatggtgtacacacacacatatacaaacacacacacacacagacgtacacagacatacacacagacacacatatacataggcaaatacacacaggtacacacagatagacatagacacacatacatagacacagacacacacagacacagacatacccagacagacacagacatagacacactcacacagatagacagacagacagaaacagacacacataaatagacacagacacacatatgtagactcagacacacacacatgtagacagacacacagacaaacacagacagacatacacacacagagacagacaaatacacacagagacagatacacaggcacacatagacacatagacaaacacagacagacagacacatacacccaaatacagacagacagacagacagacagacacacacacacacacacacacacacacacacacacacacacagagacatacacacacagagatagacacatacacacaccgacaagtacacacagagacaaatacacaggcacacatagacacacagacaaacacagacagacatacatacacagacagacagacagacagacagacagacagacacacacatacacacacacacacacacacacacacacacacacacacagggtcccctacctgcatgtgtacccagatacacacatatcaccacttacagaattggatgtagattggactcacatttgcagcacctgtcctagatgtttctgtgtcatgactgcgccttttagaatcatcagtaagaatgtagggtcagaggcttgtggtgctttcagcgttactgcatctctcacaacgacatagggtgataatttttcccatgtgggtcccgagtcaggcatttcagataatacagaaatgcttgccaaaggcaaaaataaacagacctacctttgagcaagaggcttagctgaagagaagtgtaagaaaatgaacacggggtcaggtgccgtcagattttggaggaaccgcaggtttcattgtcaggaccaagctcagccccatggcctgccctcctggctgccatccttccatcaggtcctgccagggcaataggacctggtttcttcctgacagttctggtaatgacccgcatcaggggtacatgtatgtaagccactcctgccttggtggaaaagctctgtgttcattatcacccagaggagccacctcccgtctttatccacctgaaggccatctgatatttagcgctcctgagcacccacccatctatctcttcatccttctttgaatgccaatctctttagttttctagtttctatgtttgaattgcagctgtctctgggatgtggctctcaatttgaagtgtctcaaaggcacacctttttgagtagggtccctcatatggtcacgtccaatctttaggttgggaacaatcagagggcctcattaaagtgtatttacacacatactatgggagacagggagaagctgcagtagacagagcttagaaggaggaatatcctgtaggagcaggaatgaaaagtgctacttgtgagagtttcttaaagagatgtcaccactaatggtgcatttgctaagaagagaaagtgggaggtcatgtgataagacatgcacctgtgagggcaactggctgaatgaaaccacctcgaggacaaaaagctgctaagggctttgttattctcttaaaatggtaagagcccaacagcactcacaaattatacagcaaaggtacaaactaacttatatctggctgtcttattttagaaccataatattagccttgcaagaagcaagacctcaaaaaattggtaatgactcagatatgttcctctccacggaaatctttagtaaaaggcgaaagatttgtacgatctgaagagaaaccagagtatgttgagagtgggcgaaagctctgctcaccagtaactgaagttcctagttcgtggacggtgacttttcagccccagcgcttcccagcatcttgtctatatgtcaatgtaataagtctttttatctcgaaatgatgggtgaaatagatacacacacataatatacatatatattttaaacttctaaattgcattacgtgaaaggaatgatgggtatgcaaatgtaagtctgactcatggggctttgaggcaaatcacacggccaccgctagggggcggagcggaggtccgggcttattggttcagttacatggaactcatttgtatttaatgtatggggactttatgacttctgtttcttttctataaaacccatttatttcgaaataactacacctacaggaaattgcaacaatatcaaaatttatggggaattgcatcactatagtgaactctttaaaccgagcaaccccagtgcagtcagatccacagacctcacctagatttcctaatgattcatgtgctattatgggatcatgtaactgctgcaccttaggtatagaggctggaggaactactttaagtttttttcctcctgagactgtgtcttgactacctagcccaggctggtctcaaacacaggaacttacgctctagaccaggctggcctcaagctcatgttagcccctttgcctcagcctcccaaatgttataacacaaacatgtgccgccatgtcggactttaaactcgcttttgtgaaggtggggatggctttctgagcagaaaccaaatcctctgaatataagcgtgggattttgaggctgtggctcccaaaggactggaggtgttgacagggacacacactgtctctatgacatttttggagagctgacattgtgaaattttgtaggagagtcatgagtctacattgcttgtttttttttgtttttgtttttgggttttgtttttttttgtttttttttttgtttttttttagacaggatctcatgatgtagcccaggctggcctcaaattaaccactgtagctgtagatatccttgaatttctgatcctcttgcctcttgcctagatcttcttgatcaaggggttgatcatctaacccctaaatgctgggatcatgagtgctaacaccacagtcgtcttgaattatgtaatttgagtcatggttccaaacttttatattggcctcatttgtgacttacaactcttctctccaaatgctttagagaaaatgtagacagtgctttcctaatctgagacgtgtccctggtgtgtgtgtgtgcgtgcgcgtgcgcgcgcacgccccattgttgtctttttgagacaggggctcttgtagcccaggctagcccggaactcctcgtgttgctgaggatgacctttgaactctcagatctcaactttcacttctcaagagctattcctgtgggcattcactactacacccagttcagaaagtatttatttacaagaaacaaagaaaaaaaaaaccagcactaggagctctcataggtaaatggcatagaacccttaaacttaggggaaaaggtctagcctcatcaataactcctcctcgtcctgcaccttgttggataggtttttcctgaaggctgaggtttgaaaaagttgtgattcatcagagaggttgggggtcatgatttttttcatatttaaaaggctttttattttagtttttgagaatgtcttatatgagtaatgaatttgcattgtttacagcttctctccctccctccagctcctttcatgcctcccccaattcctctcaatttcaatgacctcttctttaatgagtgtgtgagagtgagtgttgtgtgtgtgtgtgagagaatgtttgtgagagtatgtgtgtgagtgtgtgtgaaagacattgtgagagcgtgtgtatgtatgtgtgtgtgtgtgtaagaaagacattgtgagagtgtgtgagagagtgtgtgtgtatgtgaaaatgtgagagtattgtgtgagagtgtgtgtgtgagaaagacattgtgaagtgtgtgtgtgtatgtgagaatgtttgtgagagtatgtgtgtgagtgtgtgtgtatggatgtgtgtgtgagaaagacattgtgagagtgtgtgtgagtgtgtaagtgtgtgtatgtgagaatgtgagagttgtgtgagtgtgtgtgtgtatgtgagaatgtttgtgagagtatgtgtatgtgtgcatgtgtgtgagagagaatgtttgtgagagcgtgtgtgtgtatgagtgtgtgagagagcgtttgtgagagtgtgttagtgtgtgtgtgaatgtgtgtgtatgtgtttgtacatacagtgtgctgaggccacttggtattgcttgtatttatatgtgtttatggctgaccacttgcgattggaccacctatacctggagaaggctgattctttctttcttagcagccattacttgcctagagctctttatgagtgggtggagctttgtgggatttccccacccccatccactgccaaccagtgttgtcacgaacaggtcttgttcaggactgcagcatagttaacaaagggcaggaagtacaggagacttggtcacttttcttgttgctctgactaaataccagacaaaggctgcttaaggaatgttttagttagttttactgctgtaaacagacaccacgactacagcaattctcataaaagacatttaattggagctggcttacagtttcagaggttccgtccattctcatcatggtgggaagcatgacagcgtacagtcagatgtggtatggagaaggagctgagaggactacatgctgattggcaggcaccaggaagtgaactggcttgagcttctgagatctcaaagcctgccctcacagtgatatactcctccaacaaggccacacctcctaatggcgtgactctctatgggccaagcactcaaacatatgggtgtatggaagccattcctattcaaaccaccacaaggggtaatttaaaaaagaaaatgttttgctccccttccactcaagctgggtccaggtcctgaatcctcttgtaaggatagggaggatgtccacccttagcaggcatggactacgtgcacctacatgagctgagaagaagctctgatcatcatagaggtgttccctgtccatgctgcatgtgtgggcagccggccacttgcatgtcctttctgggctcagctttgctgttgtttatcattgaggctcctcaggctgaatttcctcatgtccacttacctgtccttgtgcatgcataacagacatggaccctggtacctggagctgctccagtagaagacgcaggcacataccagaattattcttttattgcaagttaataacaaaagtagttcatttcctgtacagttaccacactgaccatgtgaccttctcagttaccatgctgatcatgtgacctgcccagttacattgctgaccatgtgaccttcccagttaccatgatgaccatgtgagcttcccacttaccatgctgaccatgtgaccttcccagttaacttgctgatcatgtgaccaaggggctggagacaagcggaccccagttactatgctgactttgagaccttgggtacatgaatttaaacccttcagcctccttttcactatttacaaaatgggctaagaacatggggttccatcccagagaatctgtgtccatgaagactctgcgttagaaggaaaagtacatttggagaatggtgggaagacaaccaggctagaggggacagttcaaggtgggtggggaggctggagttctaagtgggcaaatgccatctgcagagtctggactctaagcacttttccccttgtgttgtctgacacacgctgcagttccactggtaataccacttcttgctctccccttctaggacccgactgattttgagtggaacttctggatggaatgggggaagcggaggctggtgtggctcttcattggccatatggctgtgtctcagttggccacgttactcacaaagaaggtaggagtcatgtgtcatttggttttaagcctctttctcctttggctttggtgaagaggcctgaactgtgaatctggagacagggttagcagtggggaagcccaggaacagtattagctgaagtgacgtgtcgggtggggtgttttctcaactcccctgtgttgacttcctccaggttatcttctaaaaccattgtatacagaggtttcagagtgagctaacctcagccggtgctcactaagcgcatccctagtgggatgctttagtaaaggctagcttgggagactatgtgacttcattcacttcagaagggagcagaagttatattgttggtaaatacaaggcccggagagatggctctgcagccaagagcactggctgctttcccagaagacccaggctctatttccagtacccacatggtggttcacaattgtagtggctagtttgattttttttttttttaatgtcaacttgacacaagcttgagtcatcagagaggagggagcctcaattgagaaaatgcctccataagacttgtaagggcattttctgtattagtgatgaatgagggcggcacagctcattgtgggtggtgccatccctgggctggtgctcctgtattctttaagaaagcaggctgaacaatccagtaagcagcgctcttccatgtcctctgcatcagcttctgcctccaggttcctgttctgttagctcctgacttgacttcctttggtgatgaaccatcatctggaagtgtaagctgatcacaccacacatacacacacacacacacacacacacacacacacacacacacacacacacacacacgagttgccttggtcatggtatttcatcacagcaatagaaaccctaagacaacaatggtctgcaactccagttccaggacatcagtagcctttatcttgatcacacatgtgttgtatagataaacacataagccaaaattcatacatgtagaataacaatcttttaaaaagtagcaactgagctggggagatactgtgtgtgacacacttgctgtgtaagcacagtgacccgagtttgattcccagaacccacataaagaatggccggatgtgacagtgcttgaaaaacagcaccaagggggtggagacaggcagaccccaggaagctactggcagccagtcaggcccacttagtcatctccaggccaatgagggactgtcttaagaaaacaagggagatggctcctgaggaatgaaagaatgattgactaacctctgacctgtgtacacatgtgctcatgtgtgtacaggaacatcacacacacccacccacacacatctacatttaatattgagcaatgtggtagccttagcagatttatgctcaattccattgctggtttgttcctgattcagcttgggacaggggatcttcaaagtggatatctgaaaagagatttcacaggaagctggattgtggcagcttcacagggctggcaagctaggaagaagcccaagaagcttccaggaggactctactgtcacttagggactgagtggcctttacccaggatcctctgatgcacatttcctgttactacctcctaatgtaaagaatgagcctgtgattggaaatcggcaagtgagacccagatacaacctgactggcctggaccaaccgaggagacaaactctgttcttttgaaagactcaagatcgtgatggaacagagggtctatagccctgaaagtccagagaatgagagaccatgactaagccagagcaacaggctggtcactgttttgttcggggtttatctgagcatcctctctttctacaaagttggtgcttgttgatcctgtctattctaggacagtggttttccatctgtgaaccatgaccccttttgggggcagttcatggaccctttcccagggctcgcttaagatcatctgcatatcatatacttattatacaattcataacagtagcaaaattacagttatgaagtagcaatgagataatgtcatggttgggggtcaccacagcgccaagagctgcagcgttaggaaggctgatagcccctgctctagaagatggaagactaaagggcatgctctcctttttagcgatactggttagtttctttccctcagtggtcgcttgctttctgaagtggcaaagctaagatgttagagtctatcagactcggctatgttagaaagtcccataggccttttgaacagaccaaaagataagcgtgcactggaactctgctcttgcccctgaggtggtgaggggtgcgtctgcctcagcgttcactattagggtttatttattcttaatacgttatcaaatttctctaattcctgtttatttttctttacaatatttctagaagtttatcattaatttttttctcgaggattgaagagatggctcatcactggctgctcttccagagaacctgggttcagttcccagcaaccacatagcagctccaaattgtctgtaacttgtctcaggggatcttctggcctccttgggcactaggtataaatggcatgtgcagatataacatgcaggcaaaacattcctacatataaaataaataagttaatttaaaagctccaaaactgagttaaattaaaatatttttatgtatatgtgttttgcctgcatgtatgtgcaccatgtgtatgcctggtacaagtggatccagaagtggtcatcaaagcccctgtagctgtagttacaggtgactgttagctgcagtatgggtgctgggaactgaacatgggttcagtagccaagtacccttaacctgcaagccatctctccagtcccagagtttaacgttctatttctaacataaagctttattttaaacccataagaaaatgacctactatctctaaacttgagggagaagagtctaacttcattaataattaagcaactatatattaaaaacagactcgagttatcaatccacactttacagtttggcaaaaataaacaaggattccctgaagaaactgggcattgaccactcaaggtctcctggaaaggaggcatgtgtactggctgtgtcctttgaggtatatccctggcaaaccagtgacacacacccacaggttacagtgcgaatcctgacctgctctctgaggctgaaaagccagatgcagctggtgtccatactggtgacacagacaagctgtagagaacagattatagctgcggtgaccagcactggtgaatttatggctcatgatggtgagctaagaattcaagttgcagagaaccagatgagacgtgattccatgcacaggagactcggaagtgggggactaagtgtgttcggtgtgcagtggtaaatgagacagctgctgggctctgcatgcagctcaaccatgaacccgagggttcatgtgttggacacttggtccccatgtgggattcagtttacttgaagcttttatttctgggcttctcttcagaggcagtgttgctgtggactttggtgtctactgggcaattgcttttaggaacccttaaatatgtcaaaattcacagatgcctgagttcttgatataaattcaggaattattctctctctttctctctctgtttgtctctgttactttctatctctctctgtctctctctgccctctgtatctgtttctgtgtgtgtctctctgtctatctgtgtatgtgtgtgcacacacacacattcactcatgcgcacgtatgttccatggcacaagtgtgaggttagagaacgaccttctgtagtcagttcttttcccatgttgtgtgacaggatgtcaaacccaggttgtcaggcacgtttatgcaccaagagctctcagtggcccccaacgccttggttcaaaatggcataacattcacatataacctgcacaatactcccaatgtcttgcttataatttctagtacaatatagacattgaatagctgtgatactgtattagaaaatacccacaaggaaaatgtatgcattttattcttaatattaatatcagtctagccaaagccagttgaaccctaggtgtggaacttgcacttggaatggtttggaataagtgctaccattaagtcactactgtgtcctcagatctacatctgggtggctgtggctcctgggactgtggggagaggctgcaaagcagtactctctaagtacatctgtcctgctcctggaagtttcctatgtcatattaagaaaggagtgatgcaggctgagaggcagctcagtggcagagctatatctgtgcctaagtgggcggcggccctgggttcaatcccttacactggagactggggttccacagtccttagggacagaggcaggatctggccctgtgactgtgtatttctgacctgctatctcaggctgatcagggaacaagaacgggagctagattgttttcctgggggttggggcgaggagtcccagctgactgggaagtcagaagtgaagggatgctcatcgccgagccacactggcactgtggtggccctcccattcgcagtaagtacacaaggccaggagtgggccaggcatgctggccactgtagtcagaggcctgccaggaggtggctttgtagttctggcttgggaagcggggctcccttgttcagcttcctatgtggtgctgtgaggcctggctgggcaggcagactcagctcaacctcagcagaacacgtcttaccccatgctggggaggtgggccttgcgtttttcttggaaggaggcagagtgagagctgagccatctccctgtgtgtctcaccttcctgtgaccacaggctgggctgtgaggcagctggctggcagatctgcctgtggctgggccacagtgcttctttgtcagagttggcttggcctttctgtgtctggaccacaaccttggcctcattagctccagccctctcaccacctgggtgaagtgttcctcttggccttcattggcagagctgtttttggtgctctttcaggatggaaggtttgagctgcagccatgtctacgctgctttcctctgggggggcagcgagaagcctgatggagaagcccgagcattccagttgtgggcaggcgtcagatggcgtctggtcaaagccctgactcctgaacgctgctccccatctcacccaggatggatcttttcctttgtgggtcaccacctcccagggagggccaggctacttgcagaagcatagccctccccgcttcctttttctcccctccgccttcactccctcctctccctccctcttcccctcctctggtcatgtaaagtaataaaacttccccttgagcttcttggctgagattaaatgcttttcctttaggtcaggccctctctgtgaggagcccgagggaggttgagtaatggctgagctctggctgtgggtgtgttatgattggactttgtggggacggatcacatctgcccccgttctctcatgcctctgtggctttccaccacctgagacactgtgttctcagccttcagaactcaaacgatcctgtaggagctctgagaaggctggcctggtgtggagctcagtgcttttcttgatgtggtctggctgggggatggcgtggttagtcttggcccctcggctcaggtcctcactgcagaatgtgcacaggccgagggacctcttcatggggtaagcagcctctcccggaggagtgtcagatccacacataaatggaacctcgggcactgatgtctctcctggaacccactctactccctccatcagtgcctgtctaatgaggtgaagctaccgggataaaggcctactgaccttgactgccaggaagatctggctgggatacagctgtcgggactcagatggagcagattgctttttcttctttggggagatttcatgtgtgcgaagtgtgtgtgtgtcttatgcagtatatatttatatttacttattttagaacctactgctactgatgaaatgaaacatgacaaaccacggcacacaggagactatgcactgactccctttctttctcagacagagtgcttcgctgcgtggtctcatggcatacgtagtctcatctggtgctggtgggagcgctaaccaaacctttgagccctcactcttcgctgcagccctaagctagccagggcatctgaggcacatcctgttgccgctggcacccacagcacagggtgagctgaagcagacacaggtgctgtgaggggatgggggggggggctcttgccagagtgtttttctgggttctgacccttgtaaaggcttgaaaaatacagacttcaaaagaagggagagaaactctggctttgtcatcggtgccgactgtagtcgatgcatcgttctgatggattcgttagtgtcactccatagtgttagaggggcagacagcactttctgttagaggaaccatttcctaggttgggcaagagaggaggcaggaggctggtcatgagctataaagcgatgtctttgtctgtattgacagggaagagatcattttctaaggactgaagtagaacctgagacttggaaggtggtaggtttccacagtaggatcagaagcccaacacttggatgctaattttgtcatctgtcaagttaactctgaacacctggggaagcatatgtacctgtctatgtaatgctgtatacatccgtcttcccgcgttcacctgtctactcacctatagatcatctataggtgatctgcccatccaccacccctctatccaccctcccattctgctgacaatatccatccattcatctgtctacttccatcaatctctacccatcaccaccatctctttacccacccacccatccatctactcatccatccatctacccatccacctgcccacccatccatctttccatccactcacccaatcatccatctactcacctacccatccatccatccatccatccatccatccatccatccatccatccattctttcttttcttccactcaaccatttattctgccatttagtatttgtttgagctaggtaccaggctaaattctgtttatatttatgtattatgaacaagaacggattttgtcttactcaggaaggttaccaggttgagaatggccatgttctgttctgagaagtgggttagtgtcagcctaagtcaccatggaatgtggcatggtgtctgattgtctccattttctgtggtgtgtgctgtatcccatcagagaggccgtggagttcttggtttggctttaggttagctgttaagaaagttgtgctttttggacttttgaaaatttccctgttttgattctcatcttctataaaaaactgaagacttggaatccagagagctaagtgggatcagtgtgtgtttccacagagttctctcaatccatctaaccaagtaccacatcattcaggcttttaaaaccaccattgccagactgttgtaaattcatattaaatcacaatgggatgagactatgttctttccagaaaggttctgctgaaacatggaaacaccacagatgctgtggggatgtggaatgtcaggggcactcatgtaccccggttggtgttgaatggtggtagaccagaaagctgtttgtggtgccaaacatataactggcatgccatcagctagtgtttgctcaggaattaattcattctggaaaatgagaagctatttttaacatcaaaagcctgtgcagatatgaggacatcagttttattcaaaataatcctaacttgcaaacatctgagatgtccttcagctggtatgtgagtaagcaaaccgaggctatccataccatggaaaactgcaagagagaatgggtgttagccacagcagctttagttgagtctgtatgatttctttgaaatgacagcagtttggaaatggagaagagactaacaggtaggagatggactggttgggggagcataaagggagtgcatgtgaattccaaaactgttccgggtgtttgtggggtgtgcaccgaaccctcacatgttgtgggggtgtgcactgaaccttcacatgttgtggggatgctcattgaaccttcacatgttgtggggatgcacactgaatgttcacatgttgtgggggcacacactgaacattcacatgtgatagactagtgtagaacatagggagatgaaatgggaaaccagtaagtttggcagatggtagttatgtggttgtgataatattctgtggttttgtgaaatgtccttttgggggaactgaatgaaccacagcagcacaaaaggtgttatttcttgtgagaacacaaagtacaactatctcagaacgagtctcagctagaagaagaacattgtgtgcctgggagactactcgaaagtaacatgcttaccttgtgtgtgtgaggatctgagtttgattcccagaacccacataaaaccaacaacaacaaacaaacaaacaaacaccaaaaaagctggatgtggtgggtgaaggagatggggaattcctgggactcactggctggtcagcctcgcttgtttggcaagcttgaagccagtgagaggccctgtctcaaaaaataagttgtgggctagcaagatatctcagagaacgaaggtgtttgcctccattctgatgacctgagttcaatccctgggatctacatggtagaaggagagaactgagtcctaacctctgaggtaactaacaagttacctctgacctctacacaagcatcctggtatgagcacacatgcatttgtgcgcgcgcatgtgcacacacacacacacacacacacacacacacacacttcaataaataaaccaaggtagatggtatgacacactcaagactgacttctggtttctaaacacacatgcacaatatgcatgtatgctcataaacatgtatgtgcacacatatacacacagaaggaaaactgcataaagttgcatttgcttaaaatgtgaagttctaaattagaaacatcagagctcactgttgaggttgatttttctttattctactttcctgagtcgtgagtaggtgagtatcagcgtgggctggagaagcccagatgtgtgtgtgtgtgtgtgtgtgtgtgtgtgtgtgtatgtgtgtgtgtatgtgcacatgtctgggtttgtgtgtgagtgtgtgtgtttaagtctgggggtggtgtagcctggttgtgggatggtgccgcccctgggcaggtggctctaggttctataagaaagcaggctgagcaagccatggagagcaagccagtgaagagcatcctccattgcctccaggcgtctgctgtgtgagtccctgtcctgacttccttcaataatgaacagtgatatggtggtataggccaaataaaccgttttctccccaagttactttgatcatggcggttcatcacagcaataggaatcctacctaaggcaatgatgagtgttaacaacctgagtttgggagctgggtagattgctcagtggttaagaacacttactgctcttggctatacagagaaaccctgtctcgaaaaacaaaacaaaacaaaacaaaacaaacaaacaaacaaacaaatacttactgctcttgtaaaggacctatgttcagttttcagcactcacaaccatctgtaagtccatttttagaagatccaaccctgtctcctgtcatcttcaggcaccagactgttcatgatacacagatatacatgcaggcaaacactcatacacataaaataaaaataaatgtatcttttaaataaacccaagaccaacatggtgtgtgtgtgtgtacttgtgtgtacgtgtgctcagatcccagagaacttaggaaagactttcctggccatttagtgatgggttagaagcataattctggaataaaacataatgcatgtgatgtcttgttaattatttttgaaaagcaaaagcagttctgtcctggttcatgtgacaggccccatactgatatgcctaggagcagacaaatgcttgacccatacatgaacacatcagggtggagatgggtggggtggggttgcttatggacaaccccttctggtgttccgacccctttttgtaccaacaattcctgagctcagcctgagtgtagaagggactgtggggatggcagtgggacctgccctgcccttccctgccacggtgtcaggccagggctgtccatgttgtatctgggttttagtgatatttgggttaggtgaggattacaatggctttttaacattttgaatgtgaaaaatgagtgttttggtggcattgactcacacaccagttccttgtaggtaagatggtgtgttagtccaccatccgactttcactcctcaggagggtgagggcagtgtgcaaactgatgagtccaaggtcagtgggaaagtgtttccccttctgtctcaggacagcatccagtgttgtctgtctgcacaaggtatgtggggtacatttatctgtacacaaagtggctcttgtgaccaccatcatagacctcctggagtattggtggtccacacagtgctgttacgtatttctgaaggttctttctgccctgacttggagcagcttctgtctgaggcaagtttcaaatgaagctcaacaaataggctcttcccggcagatcagatagcacttactgaaagtgtcactgtgtacgcaaacgtgtgtacccatgtgtgcccagtccccatagccagagctgtaggtggtgttgaaaagaacattttcccccacttgctaaaaccatgtgttaaaatagtctttggcgacctcatttctgaaaattggaccctgcccagaggtgagaaagccggggaaagtttgaggcaaatttatgtggctgttttctggggttagcaggatggaaaaaaccgtaaaaatgaacttcacatttctctggttttcttggaatgtaaaagcggctgagttagtctcacattgcagatgttcttttgagctgaaatacaggtctgtggaagaggtgaccatgcctcctaggacaggatggccaagtcaccatactccaagtctgccctgcatccagtctctctgtctgtttctctgtcattttttctgtctgtctctctggccgtactggggactgaacctcagctccatgcctgtcagatagtctctatgtcactaagctatgcgcgaagtcctatttctgcttgttgtttttagacaaggtctcactcaattgctcagacaggtgttaaacttgtgatcctcctgcctcagcatcctgactagggcaggcccaggccactaggcccagctcattcttttagcaggaggtctaagctcattcatccagctcttcagttttgaaaagtttctgaaagtgcatccttcaaagcacacactcataacattgtatttcttagaaataactaacttttttttttgatatagtatatctcatagcccaggctagctccaacctcactgaggataaccttgaactcttacccctttgcctctccctgtgagtatgagataacaggcatgtgtctgtataaacattttgtgaattactggggttagaatacagtgtctcatgcatgccaggcaagcactctgagtagtatccgaggagccctaactttgcctgtgtgtactaagtgtggttcacaaacaatttcattatactcacaatattcttgagaaatactttgttgctccagttctatatactaataactggagccacagagagcttatgtaacttgctgaagaccctgcagattgttaatggtcactgcaaagccttagacagtaaactatgctgacacactgccatttaatattaaaacctggtagttggagagatggctcagcagttaagaggacctgggttcagttcccagcactccatgatagctcacaaccatctgtaaccactccaccatctcctgtgggtactacacacatatgatacacatacatgcaggcaaaacactcatgcacataaaataaaaagaaaaaaaacttatcactttttctttttttactttttggtagagtaaggatcacatgaaaggcctggcatgtgcgaggtgagccccctcctcttcagacatgcccatctcttcactgcagtcctttgtgtgtgtgtgtgtgtgtgtgtgtgtatgtgtgtgtgtgtgtgtgtgtgtgtgtgtgtgtagggtatgtgtggtcagagcacaagtgtgtagagttggttctctccttccaccttcctaaggggatggaactcacactgccagacttgcagttggtgacaagctctgagctcattacccattgaggtggaagcaagcagccccttttatagtgagctgggctatcaggtaactgtggggaggaacatacctggctatagtcaggtaactgaggggatggagtctagccagaatgccaggagcttgggacattgtctgtgtgactgatagtcacacacctctactgcgggggtggggaggctgtggggacagtaacttcgacaggagccaggggtctaggagacatgatcaaacacttttcgtcccatgtaggtggaaatcaccacccattgggttccccagagttcaagacctatgctgtctgtgtgcagcccactgccccacaacaagcactgagccacttgcttgccccttattgtaatttaaaaactatctgtgtatgtgtttgtgtgtgtgtgtgtgtgtgtgtgtgtgtgtgtgtgtggtgtgtggtgtgtgtgtgtggtgtgtggtgtggtgtgtgtgtgtgtgtgtgtgtgtgtgtggtgtggtgtggtgtggtgtggtgtggtgtggtgtgtggtgtggtgtgtggtgtggtgtgtgtgtgtgtgtgtgtgtgtggtgtggtgtgtgtgtgtgtgtgtgtgtgtgtgtgtatggtgtgtgtgtgtctatgtgcacgagtgaggctccactgtaccactagggatgtgtagaagttagaggacaacgttccgtgctggacttcaggttctgccttgtttgggggaaggtctcttcactgctacgtgcttcaggctggctggccttccagtttctaggggtcctcctgcctctgcctcttgtctctccataggagtgctgaggttacaggtgcaggctatcacgtgtggctttacgtagggatttgaactcagctcctcatgtttgcacagagggcgctttacctgttgagccatctccccagacctattgcagttttataaataaaggatttaacagttggacataaggaagagacatcatgacagctaatacatctgtttagttaatcagtggaataacgaagttattttctagttaaacagaatagcaatcagaatctcttaaattgggaccaatatgtcaatcttgacatcgcgaaaagatgagaagatgccgtttttccgtgacataaatttgactgtaaatggtatgctaagggcgtccaaccttttggcttcatctgggccaaagtgtcatctaagaagttcacacttgagaactgaaaaaaattgagttataaagagaaattgaaaaaagacccatagtcctcaagtgtgtttatgattttgtcttgggcggaatttttaggcatccatagcaaacgtgtgtcagttggaccttccaaaaagattataagtctaagacatcagaaagctttggtgtggacagcttgttatttcctaaggttcccagaagggtacatgacagttccttttggcttctagatgctgtccgcagggtgcgggagtgcggccttcccagttggtgctttctgtcttctgttcggaagtcagctgagcatctcacccttgtggggtgtagtaggggaggaggctctggccgaggacaggaacttgactgcctgagtctggcggacctggcagggcagtgaggacaagatttggattctggtcacaaaaacgtgccctcgccataagggtgtgttccggacacatttgtgaactcacctcttgtccttctctttggaccacccctctacagcacagaccctggattgtcatggtctatggaatgtgggcctgctggtgtgtgctgggggcgccaggcgtggtcatggtccttctccacagcaccatcgcgttctgcgtggctcagttccgatccgtgctcctgtcctggctgtgttctctccttctgctctccaccctaaggctgcaaagtgtggaggaagttaaggtaagagtcttcctcctgcccatctctccacagggaagaggagggcaccctggcttctgatccagtagtgacctccacacacacaaagcagcagtaacccctccgccgggctccacctagtggccttcctgggttattgcagaactcagcagtcgtgggtctgttgtctgagtccctgtgaggttgtcctggatcatcttttctcccagtttggatgttgacagaggatgacaaatgtcatgggacccgagggctagaaacagagccataccctctctatatgcttaaatatccatgtagtgtgcactgtttcttagggaccatttatcttcgttatgacacacaatgtctacaatggccccaagacagtcagacaagtacttttattcttagatgatagaatagggttattaattatctactcatatagctaatcacagaagcactttatgtagacactgagaagagccagcatttttttttttttttttttttttttgtcttaaggccacagaccaaaccttgacatgacattctgacagatatgattgtttgtcagttgtgtttgctggaggtggacattgggctaatggctgttgagtagttagttgtgtatacagtctgctaagtctcttgtggaccacataaagtcttttttcctggtttcctggagtgttatgtttggagcggagggttggacctagggtctccaacatgcaaggcacatgctcaaccaccggccacactgcagctatgctgcctgcagtggttgccactgggtaaatcctttgttctcaactcttattctttgtagcttctctcctgggggaagccgtctagtccaggttccccagccagctcctctgtcaggggctggtgccatcttaaccactaactcacaggctgttccctctctcgtcgctcttgcagagaaggtggtacaagacagagaacgagtattacctgctccagtttacgctcactgttcgctgcctgtactacaccagcttcagcctggagctgtgccggcagcctccgtctgcacaacctactccatctgcgcaaggtgcctcccattcctacccgtggctgctgacctacgtcttctattatcccgtcttccacaacgggcccatccttaacttcccggagttcttcagacaggtagagtcctttggggaccgggctggtgaaggtccctacctcttagactgtgagatgtgacccccaaatggggtggcatactgaatatggggttcacaaaagtttgggaacagtaaaaggtttttcaatgtacgatcaaaagtaactcagagtctaatgggtgatgactggtgttttctggcagtggttgcccatcttgtattattgtgaacatagaatagtaaaatggctgcagtgtggctagggccatgttataatatgacatctttcaatgccagagcacctcgctcagatttcaggctctcctgaattatgagttgcaggtttgaagaaactgaatggtttgattatgggaaacaaagactttaatatcttcctgcattatttcccagcatgtgagtcctgagttagtctttggattaacttgtgttagaatgtttgactttaaatttcttatttatgtatttgtatgtgtgtgtgcatgtgcttgtgtgtgtgcatgtgtgcgtgtttgtgtgtgagctcgtgtgcgtatgcatatgtgtgcacatgtgtatgcatgtgcatgtgtggaactctgaggacttctgtaggaaatcagtatctcctatcacattatagaatcctgacattgaattcagtttgtgaagtttgtgtgcaagtgccttgcgtctacccactgagtcaccccacaggcttgaatgtttgatttgaaaagctaccatttgatttgatgactagaattaaaaaaaaacattaaataaatgttgactgtgattgggacagaattttcaacaaattctggagtggtcctagagatactcctgtagacaccttgccagaggaatttttactcaaccctggggtgtgtgtatataaaataggcatacaaatcaagcttttactatgaacaaatcataaaaggcacttactttaaaacaattatttgatatatgtacaattttaccgtttattcaagattaaaacaaatttgcataataatgagatggattatttaatttgcacaaaagatgaagccagcagctgagcatttgacagggcatggggcacataggcactttcagagttgattgacattttgaacttgtaagcatcagcgctgagaaggctgctttgagttagtcagtgaggagccctactgtagcctgagacttggggtgtttgctatgctcacttgtgacatgtgtgtctccccacttaggtgtgctgctgacccgagcacacactattatctgaataacctaaaggtggatggtctctcctgggtgggacagaggggccctgattctcaggggacagcggccgcctggttcctaagtggctacagtgaatttcaggagcagttccattgcagggaaggcccagggacaggaagctggattctgatagttcacttgagctagtaggaagagatggcattgcctgctgctagcagatggcttgctccctcccttctcattcacagactgcttatgcagtggccctgacacggcttcagattgttctggattccaaatgagagagcaaatcaagttgaaggatgttcctgggtgattgtgtgctcttactctgcaggggcctgaaaccttttctacccagcattcttgtctagatgtcacggcaagccacgtttgtcctcgcacttctccttcccactaatgtactgagacatacttgaagaatttagcttacgtgttagtacttaaaacagtggttcccaagggtcattgcctcctccaaagcacagacatcttgaagagactatgcataggcacacataaacatacatgtacaacaacacatgcatgtaacacatgtataacacgcatacatatgacacatgcagacatacacaaatgtacacacaacacaagaatgcacatgtggattcatacaatgaatacttatactcacatataacatacatgtatacaaacacaacacacatgctggcatgtgtgtggagcacacatgtgcatgcacacatacaacacacacacatatgtaacacattgcctgcacttatatataactcacaacatgcatgcacacatacagcacacatatgcatgcactcacatatagcctacacatgcatgcacacacagaacacaaatatgcatgtatgtgtctgtgaggacagagtcataggtgttgctgtttctgggacaatatgaaagatgctcagtgaagaaaaaggaaggttcttagaaaatgcttatttcatcttcataattccagagttactcatttatccaaaagtcggtgtttgcattatagcaatagcatcagtctagagtcgccgggaaaggcctgccttcccacttaagaattcctccattgtcaacggcattcctgactgtggtgggctgctgtatcgtttctcacaccctggttggctcccgaggttcactctttgattatgaaatgattttaggtctgcatttgagattatgttttagattcctggtggcttagtgatggcacatgacctcaaagtatggctcctgtctgtagcaccatcaggaatggagatgtgaattctcaggccttgccccagaccccaggctgagaaccactctcttgagtctgtcagaggaatgggatgaaggcagagttggtacaggattggtggactcagaccatcctcatcttgcctcttggaatttccttgacattgtgaacttggctctttctcagttttccagccaacaactttttgaactaaaccccattctccccctgggatggatagtaatccttggagtcgaagactaaagccatccagaggaaacaaactctttccccagctgttcatgtgcgtggggacctgcccagtgggacctgcactttgttgggatgcaaagccattcttgtattccccttctcctctccaacttcggtctttaggctcagacaggaacaataagagcgtgtatcaggtcctatgccctgtcctctgaagcagatgttgaggccatggttcactcaaacctttagcaggactgctggtctgttgagcatcagtctaggaggatgggtgggctcaccctgcagggtcaatcttctcaggtcttacttctttcttccgggaggtggtggcgcatgcctttgatcccagcacttgggaggcagaggcaggctgatttctgagttcgaggccagcctggtctacaaagtgagttccaggacagctagggctatacagagaaaccctgtctcagaccaaaaaaaaaaaaaaaaaaaaaaaaaaaaaggtgaaaggcaggtgctgacacctgagactgtcttctgacttctacctgtgctttgtgtcatgtgatgcctgcacacacagggacatacacactcgcctcacatgcactatacatacacacaaagaataaaggacatttgagttttagatactttcctgcactcacactcacatcacacacgttgtacacacacagaataaaaaggcacgtgattcctgcactctcacaaacctacacattcaccctatatgctttatacacacatagaataaaagggcacacgattcctgcatttgcctcggatgctggtgagttctcaagttctctgtaagcaggaggaggctacaaattcaatctaagaggaaaagaccaggaagaaaggaagatggaagagcaataatggaagaactctggagtgttggagtggatgaggatgaggaggctttaccaccagggggcagcagcatcccatgtggaaataaacccagcagggacaagcaggctccacgtgggaatctgaaactccaagtattaaaaaaagagagagatacatatgcagctaaagacaagagctcccgggtactggttatgtatcaaaagatggcctagtcggccatcactgcaaagagaggcccattggacttgcaaactttatatgccccagtacaggggaacgccagggccaaaaagggggagtgggtgggtaggggattgggggggtgggtatgggggacctttgggatagcattgaaaatgtaaacgaggaaaatacctaattaaaaaaaagattgaaaaacataaaaaaaagagagagagagagagaggaacacctctgcagaatatatgttactccaatttctaccacataatttacatacagaaactagggaagtgtggaaaaggtgtcctctatactctaaagcatgtgaaattttcattcattgaacaagcaagtgtcaggtgcccaggcttcagctactttccctacagtagatcagccccacagcagctcagcatctgaacttcccaggagtacagcgggaagcaaagactggtgtgtggaaggcaggctgggaggagagctgagtaaagacagtagtagtgggactggtgctggagcttggttgttagagtgcttacctagcattcatgaggccctggtccaatccctatatcataccaggcatggtggctcaggcctcaaatcctgtcacttggcggggggtcggggagtggagtggagacatgatgatcagaaatttaagatcaagggctggagagatagttcagtaggtaatgtgcttactgtgcaaacatggagacttgggtttgaatccccacagcacacataaaagctaggtgtgccagtgcacctatgtaaccccagtgcttgggggtgggggtggggcaggtgaatcttggtgcttaatggaccagtgagataatagcagctcaaggttcagtgagaggctctgactcagtcagtcagtcagtcaatcaatcaatcaggtaaagagtgatagaggaagacattggatattggtctatggttttcatgggtgtatatatatacacacacacacacacacacacacacacacacacacacacacacacacacacacacacacaagcaggcacagagagacacatgcacaattcaagaccaaccttggctacaaagtaagaattagaatattgccttgaaaaaagaaaaaaaaaaagatgatgttgccacgctgatttgctgtgacaggagctaaggaggatagagtatgtctggctggcataagggtctagagttgaggttctcaacctgtgagttgcaacccctttggaggatcaagtgatcctttcatggggtcacatatcagataccctgcatatcagatatttatgttacaattaataacagtagcaagaatacagttatgaagtaataagtaagtacttctaacatgaggaaccatgttaaagagtcacagcattagggaggttgcgaaccactacactagaggtccagttgtccagacctggttcatggcttctgtaccagctgccagtttggtgtacttcctgggagagaccagtgcacatcactggctctgctgtgggtggctgggttggggtcattgatgctgggcctgagtaagaagcatttcatggataggaggttagggacttgtgcaatacagagaagcatcatttggtgcctgtgtccctgggccccacagacaggagtcctgacccaggaaaggcctttgctgctgtcagacatctccatgtctcccaagcaaaggacaagaaccttccgtctctgacaactgccatcttcagtcgtcacagcgtcaccgagggagagagacgacattcccttttatgcaatttgcatgaaatgagattttaaatcgtaatgcgttttaaagtacacttggcagacgagctaatgtgtgttttttcagtggagtctgagcttgaaatcccaccgtggcagtttccaatgatcttaaggttgacagtcccctcagttggaaatgcctcaaatggaatgctctctgtgcagcattgaggatgggcactgtgtagcagcctgtcccccctgctgcgaggcaggggacaaatgacttgcaataagagactgcactacagtggagtgcaagtggactgtcaggattaccaaccttccagaaaggcaaatgcgtgtgcatgtgtgtgtgcatgtgtgtgattgtgtgcatgtgtgtaggagctagcacttctttttttttaaagatgggtctcttgccagcagcttaccatgtagcacaggctgactagccaaatctctaatgctctcgtctctgtctcctcagctctgggattacaagtgtgtattatcatgcctagctttttatggggatcctggggatcatgcttgggtcctgtttatttgattagacttgtactcactcagccatctttccagccctgaataaaaaccttcacattttcttctttagataagagtgaatcgacagaggagtgggtgatgactggtgcgtctgtggctgtaggagatgctctgtccttcctggcagaggtgacacagacatatccctcaaagaagagtagggaacgtttagttaggctcccaggaagtaggtatgttgtcaccacggagccaatcagccaccgtgtggatggacttcatgcgtttgctttataggtatttgtgtcattttgcctgtggcttggggacacctagcagagcctccaaactggccttttgctgagtgtcaagctgggaaggtaaattttctgccatcacccatgtgttgtctctgctcaccaggttggccctgcatatcagcaaggtcctggaaccccagatgcaggctgggcctttggggacctgggctgcagcttatgtggacagcaccttttagaagctggacagattcagctgtatgtgagaattgctatgtgccaacacacctcttgaggctgttagcacattcatctagacaggttgcttcagtgtaccagtatgcaacaccaagcaaggcctggcttcatccagagtgtcttaattagggttttactgctgtgaacagatactatgaccaagggaactcttataaggacaacatttaattggggctgacttataggttcagaggttcagtccaggatcatcaaggcaggaacatggcagcatccaggcaggcatggtgccaggaggagctgagagttctacatcttcatctgaaggttgctagcaggatactggcttccaggcagctaggatgagggtattaaagcccactcccacagtgacacacctacctcaacaaggccaggcctactacaacattgccacacctccaaatagtgccactctctgatcaagcatatacaaaccatcacatagtggtatcttgatgtcagttgccttggtgtggattcttactgccccgactgacctgcagagtgaggtgaaccccccccccccagacagtgaggtgactttgacagtgaggtgatcctcacagtgaggtgaccccacagtgaggtaatccatatagtgaggtggctccatgtttgttaggttttgtgtgtgtgtgtgtgtgtgaatttgacacaagatgatgacaagtggatcatctgggaagagagaatctccgttgagaaaatactgtaggcaaaagtctgtaggcaagcctgtggggcactttcttgattaatgattgatatgggggggcagcacactgagggcaatgctaccctaggcaagtggctcttggcagtatgagaaagcaagctgagtaagccacagggagcgagccagtgaacaattcctcccatggcctctgtttcagttcatgttctgacttcccttcatgatgaagtgtaaggtggatgctaaataagccctgtcttcctcaaagtgttctgatcacagtctttagcacagtaagagaaagcaagctaagacaccccctcattgaggtgatccccactatgatgtcacacagccaagcggtctatacaatgaggttaagccatccagtgagttgacacctacaagtaggtggccccacacaaagtgacccccacagtgaggtggaaccaccagtgagggcacttccccatagcaaagtgatcctcacagtgaggtaactcccacatagtgaggtgacccccacagcaaagtgtgggtattggacttcacactcacatcttgccatcaccactgtaactttcgccttattttgaggaagccaagtcccagagaagttgagagatttctcaggatcatgtagctgtgtggttgatgatagagtctggcctattatgctgagatacttgtctcataggagtataccctcctcctcctcctcctcctctccctcctattcctcctcttcctcctcctcctcttcctccccttcctcatcattttcttcttcttcttcttcttcttcttcttcttcttcttcttcttcttcttcttcttcttcttcttcttcttcttcttcttcttcctctccctctccctctcccctctccctctccctctccctctccctctccctctccctctccctctccctctccctctccctctccctctccctctccctctccctctccctctccctctccctctccctctccctctccctctccctcttcttcttcttggaaaaaggtagactggcagactgacagacatgcttaattctcccaggtcactcactccatctccagtgtcctcccctttctattgttgccttatcctagtagctcaggcatgagtctggcggttgggtggaaaccagcaggctgatcaggacccaaagagaggcagtttcagggggcagagtgtctgaaatcctggcccaacctggactgtctcaggtcaaggcttggtagcaggatgcagaaattggcattgttcttggctctcgggtaacccgtgttggcccacctgttcttgttccgggggcagtttctgcaactttcttacccaggaaaagtgagtgtacctgaggcaaacaccctcccattgccctatcagtagaaacggcaataataatttacacaaaccttaacagaaacatcacagaagagatgttctgcacagcttgggaccaagcaccgactgacgctgccttctctgttgtcccttctttagatgcagcagccagagctcaactctctgcagcacagcctctgcattgtagccaagggcctgggtcgtctgctctgctggtggtggctggctgaactgatggtacacctcatgtacatgcatgccctctacagcagcgcccccctcctggagagcgtttcctgctggaccttaggtaattgtgggaactgctaaggttttacatgtgtgagctgcttggtgtggttgatgagaaaggactgtgtctgagagtgaactgagagtcctggatgagtgaccccctacttgggatggaattgacagagtatggctgggcccatgtcttcacaagaggccatgttacacttagtgggagagagcagagttgctaaccagctccagaggctgttctgtgagcaggtgctccaagacctacagactgcatttttttgtctgtgagcttccaagttgggtagctataggtttgaatcccatctctcttagacacgggtgggcagctttggtggagcttacatctgtctgaacaccttcatctcaaaaatgagacttgccctttcagagctactgtgggggttcagtgaaatgttgtaccttttggatgggcctcacagtaaatcctatagatagagtaagtggtgtatgtatatgcatgcgatgtgcatatgtcctctggatagagtatatggtgcatgtgtgtgcatggggtgtacacatgtcctgtagatacagtatatggtgcatgtgtgtgcatgtgtgtgcacatgtgctcatgcacatgcatgtcttcgttggtcttctttgcttgtttgcatctgtctctattctgccagcaaggtagtttgggagtcttacttccccagaaggacacagtctccaggtataggatttgtctggagaaaaccatttgtgaaaaccattgtccttcattctttcaccctaacagcagaggccacacatactgtgactggatcttcccttatcctactcagttcttttgggggactcttgtttggctggtctctatatgtgcgctctctctctctctctctctctctgtctctgtctctgtctctgtctctctctgtctctctgtctctctgtctctctctctctctctctgtctctgtctctctctgtctctctgtctctctgtctctctctctctctctctgtgtgtatctctctctctctctctctctctctctctctctctctctctctctctctctctgtatgtgtgtatgtagaggcagtgagctcttgaaagggagtactttattccaccgataatgtgctctgacattctgttttgtactgttatatgtgaaaatgttggccagaaaccagccacctggctgagtccttccagggtgtgtgagccctttctctcatacctgcacccggacagggaatggctggctcttgtgcagtatgcacagtcagactcacatacttatacaagtcagctttccaaacagggtaacacttttttgctcctctgaacagagtttgagtttccaaggcttgtgtctcattgacacttgattttggcttttagttttgaaagcctgatgaatgtgaagtatacctcattgcttctgcaaatgcgtgggaaccaaagccttctaagctatgtgacaaaaataaatcttctctccattaagatctcctgaaatcattctgttcacacgtgtgcagagaccaacagtgccctggggagtgacttttagtcaccactcatttagagtcaggttgcttcactcacatccgtgtggtttacagcgtcttgatgccctgtgaccatgtggcccatgtgataaccatgacaatggtgacagcactgccttgaaatgaattgtcactatttgatttttttttttttttgagacagggtctcccttggttgattatttggaacttgcttatgtggaatagtctagcctcgaactcacaacctcctgtgtactgactgggattaaaggcatgagtcaccacacctgacagactatgtcatttctacttaaccagtctgagctttacaatgaagaatcgtattgtcccccagtggcatcccatgtcccccaggccagagaattggcttcatcagcacacacaggagatgtctattctccccacgctgatgtatttcttaaggtttttgtgagtggaatgtcttaggccctcttagagacgcacaacacatcatacctagtatctccaccagcatttttactgcctgaaaccaatcttttacccccttatgatatccctgagagcatcaggcactttgtcacatacacctggggagctgccatctgccactccctttgcaggaagtctagaatgactggtgcgcgcagctgtatggatacccaaagttagattccatggagtccttttctgcatgattttaactttacttatagctgaatcgtattccactgtgtatatgtaccacatctattatctacttgtctgttgaaggatgtttattttgtttcccttacctgggtattgtgactagggcagctatgagcactgccaagtgtctgtgcgataggatgtcaagtcccttccgcatatgccaaggatgctgtggctgggccgtatgagagacttattttccgtttctgagaattctgcatattgagttccagagtggccttctcactaatctgcatttccctccctgttcacagcgaggcttttttttaaaatacttttttattacgcgtattttcctcaattacattttcaatgctatcccaaaagttcccccccacacttccctaacacagcgaggctttaagcattctccttagtaactgcccctacacacacacacacacacacacacacacacacacacacactttatttaactgtttggaaagcagagagttttcacactccttctctctctgctttgagccccacaccatgcttttgtctcaaacattgctttgctctgcctacagactttgcagctggagggtaccaaagactttttgtccatgactggtggggagaacagcctgccagggcctcaggtgtggctttgctgggtggacttgtcaggagctctggttgtctcccctacttccttctgaactgagccatcccgccaaatacccggggatccgtgagagccctgcagagaccccattagctgtgactgcaggttatgaacctgtcacttacactgtgtgtgctcagatgggaggggcctttcccttcttagagataagttatgttgaagtctttcaaacgcatgtctgtttatggaaacatgtcgagttaaaaccgtctgtgaggaatgcactgattgggacttccacctttctgttgtagaaaggtgtggcctcatgttcccaacagccaggcctgttcccgacatccaggcagcttcagcatccctttgcttctcaagcagaccacacttcctaaacccggtgccatgtcctttggtctctgtcatgtctgtttgtctgtccttcagcctctctccttgcctccgtggttcccacgctgggcacatctttaaacacagctggtgtggcctcacctgggtgttttcattagctgttccttccaggtggaacaccctttcctgtctgacctctcatcactcccattgaatttaaatgtcactcccccatagacgctttccttgtgacccgaacagaaacggcctccctatgttcccgcaccctccaggttctcagcacagggcttgtctgacctgaaacttccttgctttctctgccccacaccacacagataagctgcaaatgggaggaacttccttggtcttcttcaccacagcagcccagcacctccaacaggagtgagccggttgactctacaggtgcttgttaagtgtgagcagtgcacttggtcaggcacacacccctgttgttataagcagcttttccaggactggggatggcccagctgctgatagtgtaagcaccaggccctgaactcggatctccatcatatataaaaagccccatgaggttccctgtaccttcaccctggcactgtggggagaagcatgcagagtcccgaggattgctggggcttgttagccagtcactctaacaaaagatgtggtgagctcccggttcagtgagagaccctgtctcaggggtacactggatgtcctcctctgacctttaggtatgcacgtgttagcttgtgtgcccctacatgtgcacgggtacacgccacacacacacacacacacacacacacacacacacacacacacacatacacacacacacacaccatgtgtttacaagcatgtttggggtctgaacatgtgacttttagttataaccttgtgattgcaaattgttatcttggaagaaccactgatttataactaaacacattggtgtttagttataaatgaacaagacataggtttgattcctggcactcacagggtggctcataatcatctgtaactccagttccaggaggccaatgtcctcttctggcttccacaggtaccaggcacacatgtggaatacatacatacacacagccaaccaccatacacagaaaaataaataagataaaataaaaattaaggaagtaccagttggtgcctccaaagacggccatgtctgcaatctctatggacctgcacagccctgtatgtcagtacacggaccaccagagcagtgctaggctcctggctggagggcagcatcaatgtgcgccaattcctggacacgcagccccattcaggtagcacagctgcatctggaaggtgatataacatttatctcagccctttcctggtagagagaggaagagagaaggaaaggggaggaggtatagagagaggaagagggagagagaggaagagggagagagggaagagggagagagaaaagggacaggaagggacagagggggcacgagtatctgaattagaggttcagggagcacataccagaaatggccaggaggtggcagtagaagctcactagtctttagatgaaaaattctagcaatcaagataaaattttattagcttaatatttggcctctccttagaagtcgacaaagtatattgatgtggtggtggtggtggtgtgtgtataagtgtatgtatatgggtgttatgtatgagtatatgcatgcatgtgtgagtgtacatgtgtgtatgagtatatatgcatgcatatatatgtgtatatgcctgtacgtgtgtgtgtatgcatatgatgtggacatgtatgtgtgtgtgtgtgtgtgtgtgacagagagagggagagggagagagagggggtaggaggggagagaaggagagagagagagagagagagagagagagaggagaatatccattctcatcccagctttcaagttgtacccaaatgtcctcatgttgggattttagactccttttcacgaaattccccagtaaaatcaacaattctctagtgaaaatctgtatttcaattttctcaagtttatagatttcaagcaggacacgcttttacgtagagattgcagacgtggcagtcactggtgttagcagtgagagcttcccagtccctttatttctaattggggaccctgacatttgtccacagtactccaatagtatctccagaagacatgcctgttttcttctgaactccactcttttaggaaggcactgaatggccgactggaaccattcggtttggcatagcctgagatcaaggggagcaaaggaggcagcgtctggcttttcttgagaagagctccaaaaacccgtttcttgaggttgttattgaacagtgtctcatagtgaatgcatgatagatccaggcattcaagacaggagggggcattgtgagaaaggagctttggcagagtgtttaagggtggacaagagggagtccagttcttagtgacagaggaagcaaaatgcctggggtgtactggcacctctttcaaggccttacctgtgcactggtgtgggtggagcggagacacacctgtctcctatgggcgaactgtccagggtttggtggctcagggttgtgctatctgtgtgcccatcagagtggaatgcctcaaagacatccacttgctcttgctaactctgtgacatcttgagaagggagacacttgatagttgttttgaaaaaaaaaaaaaaaaaacgaggacacaaatgttcggcagacagcacaggcccctttcctcttccgtccttttgaaatgttgaacacttaaaggcttgttaagatatggctgaatttattttttatatacattctctctttggattagaatcttaaggttatttaagattactgcagtgtgaacataaaggttctctggaatttactaccgagtagcttggctggtcagctatggctattccatgtggtgagagggtaatttcatagtgcacgcttgcagatcagaagagatgccctcctgacatgtcattggaaggggtattggtttccacctaacaccagctagtccctgctaccatctccccttcccccaacagccctcaggacgtcatggtttttgttgcttgagccctagagacctggattacagataatttcttagacatatgaaataggcaaatcttccctttaagcagaattgaaatgggatgtctgaagttatcagctatgctgggaagatatttccctttgtggaagaagtcttgcttccgtgaaggatacacaatagaatccgttcattttgcacattttcagttcttttgccatagattttgcacatcacctctcctgggcaaagcttcagttgaaaatttacttttcagagtctcagcatacttggctgtgtgcacaactctcttcttgtcccacattatctcccagaggcttgcttggctgggtgtgtgtcctgttattttgtgagatcttttcttttaattaaaatttaaaaaatgacagttgtactggctggtttgtgtgtcaacttgacacaagctggagttatcacagagaaaggagcctctcttgaggaaatgcctccatgagatccagctgtaagacattttctcaattagtgatcaaagtgggagggcccaatccattgtgggtgggaccatccctgggctggtagccttgggttcaataagagagcaagctgagcaagccaggggaagcaaaccagtaggtaacatcccttcatggccactgcatcagctcctgcttcctgacctgcttgagttctagtcctgacttcctttggtgatgaacagcaatgtggaagtgtaaactgaataaaccctttcctttccagtttgctccttggtcatgatgtttgtgcaggaatagaaaccctgactaagacaacagtctcatacatgcatgtagtgaattttgatcatttttatcccccttaccctctcttgcccacactcctttctttccaacaagtccccaccatgctttcacgtcgtgtgtgtcccactgagtttaactggggttgcttgtacgagtaagggtaggggcttgtttaccagagcaccaaccacatattagtgggtacacagctgaggaaaaggaccccatgccccagcagccgttgacggtccctcagggaggagtggggtcttgcagccccttctatgttggaacgttgatgggttcagtcttgtgcaggtcttatgcaagcaaccagagctcaggtgagtttgtgagttcagtggccgtgccgtgtgcagaagacatcctttatagcacccttcccccagctcttagattctttctgctccctcttctgtggtgttctccaaacctcagaaggaatgatgtagatgtcccatttacagcctttcttctcaggctgcagccaggtatgcgtctctgcgctaattgctgttttctgcaataagaagctccttgggggaagattgagtgagctgcgatagaaacacaggtgtgtttaggaggagagtgatgccctcttcctccttctaaatgcatgtgtgtgtgtgcgtgtgtgtgtgtgtgtgtgtgtgtgtgtgcgtgtgtgttgcctatatacatgccatgggtgagtgtgctgaccctgtggggggacagaagacagtgtcaggacctgtcagatgtgggtgctgaaaactgaacctgggtcccctgcaagagcaacaaatgctctaaaccactgagctgcctctccagccctctatggggtctttttattatttatgaatgaattaatttatttttgaggcagggtttctctgtgtagctctggctgtcctccactctctctgtagaccaggctcaccttgaatccacagagatcttcctgcctctgtttcttgggtgctggaattaaaggtgtgtgttaccacatccagccctgtggggtcttcttaatgggtatattctggactgggtatgagctgatgtcagtagattgtagttgtgccatgatgaagatgggaaataacatttattgccctaaactcctaattcagcatgcctgttttgtttactgctgtgctcaggggttttgtgttaatatttccccgtgttaaagtgcttcggaatacacggtgcttaagaaaggttttgttgagtcttctttgctttcactggacacagtttgatgttctgcgtgatgtgtaatggtaaaggtagttgataaagggggtgagcagacaggattgactgttctatggaggtaactctctcctcggcaggatacccattctttgaaaagagaaactggtcatttaaaccttctaagaggaaacattttagaattcaatttccccacatttaaagtgtccgagaatgtaagcggctgagagtcaacactcctctgagttaattttgttcctttgaccctgagagaattagccagagggttagaggtatcttagcggaagatacaattacctgggagaaatttgttttgtagctgctgagaatagagggcttgtttcatcaccttctcctgccacgtgaggagagtgacagcagatcttgaagggttagaccagctgctgaagtcctgttcagcatagagacatcatgaggcccaactgaccttcttgaccttggcctagatcttcctttggggtggcccacaggcttctgagcttgggttcttggtggctgaggtcctgtttgtcctcttttcccatctgtctcttttctaggtgaagggtctctgagtgtcttgacttcactgagctgggagcttgagtcaagtcaggaaggggcagctgctctcaggcaccccttgtacctgcacctctcttgttcctctcacacttctgttctttgaggctggcttggtgaggacctccagacagtttctctgtgtttgcttttccctgcatacactagcttcctttggcgttaaatactacttggttgccctgccttctggcccattacatacaggctcaggctccatgtcctcccgggaactggaccttagtctggtaagtcaggtggctcaggtggtagattcctctcctctgacggctgctgggtaccactactgaatagaatcttaatttttaaaaggtttattttaaattacatgtatgcatatgtgagtatatacagaagaggccaaaaggagatcagaactgccagagtggagttaaagatggctgtgaggttccatgtggtgctgggaactgaattcatcgccctgtaagagcagcaagtggtcctaatggctgagacatctctccagcttccaaacagctgttattaaggccaagtgtgctcagaaacttgccctagaaatggaggtgatagaccttacacacaagcacatgcatacacgcatgcgagtgcacacacgcacacacgtgcacatgaaacttgtaagttgtaataaagaagatgctgcaagtgtttatctgtcctgtagcttaagacctatataagaccaacagagttgcaggtccttgggcctttccctttgtcacagccaatgacttgacttgagtggtttttattcttatgtatttcttttctccctccctgttttgtgtgccttcatatgtcagtagttagtcagatgtgtgagttctggggcaggattgtctgggccctactgaagtagctccaacatccaccaggagatctctaggctcctgctttgtctcttctgcttggctgccaagcctcttaggacacagcctggcttactgttctctggggacctgcactcatcagggattagggagcaggttgtctgtccctatcatcgctctggagctatggagtctgcccttttcccttccaaagcacttgtgttaatattctcgaccctggaaaccctgatggcaccttcagctcttctgtcttatattttccttccctttttcattcttcgatcatgctagataagtaaatatccaggaggggcgtgtcaagatgccaatgaatactggaaaccttggatagtactaactactatctatagcatgcttttttcccccctgaatgtacatgcctatcataaaggctcgtttacaaattaggctcaccaagagactgacagtgaacatttagaacagtatagcccagtgtgggagctggggagctggggagctggctagctggctcagttggtgaaatgcttgctgtgtaagcatggaaacaaaacctgagtttgatccccttggattagtagtgtgcagttgcaacctcagcactagaagatggagagaggagaccctcttgggctactggcccatccatcaggccaaatcagcaagggccaggttcagtgatagattctgtctcagaaaatacagggaagaattcttgtggaatacacttgatattgatgtatgtgctctatgcaggtatgtgcatgcacacacatgcatgtacgcatgcatacacacacatagagggacataaactcacacatacatgtatatacaaacaatttagtgcaattaatactatgcaaatgtggtctctctctctctctcaaagtatcttattgtagtgaattcctttgtcacattgtgaggtggcctaaggaggtggatgatgggacattgtgatgaaggtttgctagcatttaatattatttgcaaagtttgtgataccacgggattcaatcagttaaccagacaggggaagggagtaatgtgtgggtagtggcttgaatacatgggataaagaagtaattggcaactcaggcaggatgaagtaggtggcctaagattccacgtgaagcttagggtagcatgcagcttatatctcctgagttctttatttctggattttccctctgaaaatgtggaaagcggaagttatgggtgagggtgtcttgtcatcatctgcatcaacatttcttagaaacagacttaggagctttgtaaactgctcactggacagatgcagctggttcctgggagcagccttcttttcaggcaccgaaggtcagctgctggccacagtttgcttcgtcagtaacgcgtcataaataatgtctatagattattacatagaatacctacagccatactaggagtaggggctatctttttaatgcttagattattaaactgatatataaaaacataagcttacatgtgtcggtaagttgctggactgttttgatacatgtatatatggtatggtatttaaatcaggctaaacataaatatatctttagatgtatattatttctttaggtttgtcttcctgcatgtgatgagggcttgcgtttgtcttcctgtgcactttcattttctttaacataggaccgcctgtgtaactcatgttacaagtgtcggggcttgatcttctggggtgaacagcattccatggtgcacacactccatgttttgtttttcttacccatgctcccacctttgggctcttggctcttctccatttctgagtggtgtcagcggctctgcagtgaacactggatgtgcatatctccttggtttcctttggatttagtgtcaggagtgggatttcccagtcatgctacctctgctctcagctgtgcggggaacttgtgttgttccgtaatgctgcggaagttttcgctctcatcagccaggcacatgagttcccttttctccagcacatgcaactgtccatctctgtttgggatcacggccattctttctagagtggagtggtagcactctagttgtgatctgcagtcctaagatgcttaccagtgctaatgtctcccgcacacccaggggccacctgcatctcttctttgagagatgtctgcttcagtttaatgtttactgttagctggtttgtcttttttgttactgagttcttggaattctccatgtaatctggtcagatggacagtctgtaaacattttctctttctgtaggttgtctctttggctagatcactgttttctttattgagcagaagtgtttatcctggtgtaatcctgtatgtctgtttgagcatttgcttcctgtattttggggtcttgtctccataatgatctcaacatcgtgaagaaattctcctgtggtttttttttttcttctacaatttccatgtctaacagttaagccttgtctgcgtttgagttcatgaatttaatgagtgatacatatctaatttaattctccaggagaatatctagttttccaggtaccatttgttgagaggattgccatttcccactgtgtattcctagtaccttggtaaaggaccagttagtccactggtctctgtgtctgtcttatgtaatgccatgttctttggagggttgtagctttgtagtatgttttgaagccagagagtatgatgccttctaaattgttcatctttcaccatgatggctatttggagtgctttttacttccaaacaaattatatatatttttctagctatgtgaacaattccattggtattttgatagaaagtacactgagccttactttgggtagtataggcattgtaacaatattgattcttctagtccttgaaaatgggatagctttctgcccttccctccgtccctctctgcctccctccgtccctctcttccccttcatgttctctccctttccttcctttccctcactcttgagtttaattcatactgttttatagtttttatggtcaaagtcttttatgacttaggtaaaacttattttttttgtagctattgtaaatgttgttgatttcttgatttttattctgataacatatcgttgatgagtgtaactggcgtgcacatgggaactgaatggagggccccatgtgtgatgggcaagcactctggtgctgtgctgtgctgtgtgcccagccctgtgtgttggggttttttgtccatatagccttctgaatttgatgactggttttaccaggttcttttgttgttgttgttcaatttttgtggttcttgacctctgcagctaaggtaatgtcattttcagacagtgacaaactgacttgtccaatttggatctattttattcccctcttgactctccttcgtgacgtatgccagctgttggctaattacatatggcattcttgcgtggtttagctggtagagctgagaagcatctctgcccaagccttgactgacatcacactatttgaccacttcgatggctcatgaaggacttcttatataaggtggttgcagattcctttaaactgctcagagctgacaattcaaaagatcacccatccaccccacactcctgtgtcctgtgtggcacagagatggccggatggcagtaaccttgagtgggctgagtggacaaggtgcttggaagccccaatgttttagccatccttgttgggctttgagcatttgtaatgtgatagtcaggaaaagcacatgccaaggtctctgcaaagtggcatgtcatggttgggtgaggactgtgtccacacacataacatagaagacaaatatcaggtgtgaaatgtttaaatgtttagttaaaaggtaaaacacagagttttatgtagtttataaaatttatatttttaaaatattctgtcactaaaagaaaggaaaacacaaaacgtttatgaatcatatgttgagagatcactttggggagggggcatctcatggcagttggaggaagatgtcactgttttgttttgtttttatgaagctagtggagttcaagtctctgctgttgcttagcccagagacttacaaagggcaccgagtctctgtacatctttgcttcttgatctgctgtatggggccagtaatatggcacattgccaggtcaacacaaacaccagaatattttatatcaaatgtagctaattatttgagtttatcctttgagaagagtccccctgctcacctccaccattctccagacaatgctggtgccagggaggggacataaggaagccagctgttttagtaactcctcccactgctgggacagaatgtctgacacaaacagcttacaagaggaggggtttatcctggatcatggatcagggcatacagtctatcatggcaggaaggcatggtggccagagtacctcatcactgtggctgtggggtctgaggagctagttgcatcgagttggcatttgggaagcagtagagagtgtgggctagaactgacactggactgtaacccagagagcctgctccccagagattcactctctcctaaggctccatgacctcctcaaacagccaccagctgggagctaagagttcaaattcccgagcctgtgggtaacatttcacactcagcctgtaacacccactgtggtctctgccctgaagatcttatagaaagctgtaatatgctatttacttgcaaaataacatgtggctattttggcatggacatttagaaaaactttaagagattatgacatttaggcaatgctttgaaaaaaggtagaattttgacagacaaaactgaggatgtagaaccattagcacaggaatgaatgggggcaaagagctagggaatggctgccctagtttgatggtcactgctgtgataagcactacgaacaaaggcaacttggggagggaaggatttatttagcgtccacaccgcattacagcccatcactgagagaagaaactggagacaggaacagaggctgagatattggaggacacagtttgctcatccggctttcttatacaacccggcacttgcccaggggtgctctgcccgcagtgagatggcccctccccatgtcaatcagccatcatgaaaatgcctgataaacatatgatggagccaacacctcaaccgaggttccctccacccaggtaattctagtttgtgtcaagttgacaaaatccaaccagtacagggttaaatggaaaatgagatgagtgaggctgagagactcagggcaggaaaatggagtgggcctagtctcaccttcctctggtggccaatcccccagtgcagatctctagtcactcatgtgagaactagtgggctgggggatgcttcagtgggtaaagcattttcggtgcaactgtggagatcacagttcaaatccccagagcccatataaagcccacactttagtgcacacctgtagtgcccatgctccagtgaggagatggaaggcagagacagaaatatccctggaagctcacaggcgaggtagcctggcattgccaatggaaataatgaaggaatgttgtcttaaacaagggaggacataagggccaacacaaggtttttcatatgtgtactgtagcatgcgcatctctaacagagaggggaggagtaagtaatggagacaggggaagagggagagaagaaaggaagagagacacagagagagagagacagagagagaaggaagagagaaagaaatgagagaaaagggagagggataaagtgggaggggaagagagggtgagggaaggaaggagagaaagagagacagaaaaggatggagggagcggaagagaagacaggaagaggaagagagaggggaagagaggaagggagagggaaggagagacacactagagctggaagccagttgctagcttctttatgctgattaaaaccatagtggggtaatgacaaaaagagaccaagggtgcaggtgtgtagttgtggaagggctgagctccagggggctgagctgggccctttctctgacagcacgctctgtagaatgtaacattcacctcctaccatcttgaaatcagccctggttctcatggtgggtgggaagccatgttctttcctagacaggctgagttggcagcactgacggtgggtggtggcctgtgtctaggctgctgaagtacgctgagtaacagaggcagctctgggcagtgcagggcttctgttgggtttttgcttcctagctgcgttctttttactgagaatggaaagttccaaatcctcagagaacagatctgagagcagcctgagcttcagtagggacccagacttttgaactgatgctatgccatcaattccatttccagaatacagtacaggaaggccttgtgcaatcagtgacatattaattcagctactttccaaggtggcatttatgacacacaagcaatctgtcgaaggtcaatgctggggatgcagagggtgtggggcattctttctgatccgaagcagtttgtggtctagttggatggctgtgtgtatgcataactgtgggctaatgtgaaagtcacagaacatactgcaaccagaacggtgagagcctaagaggaggcggctggctgtgctgctgccctttaactccttgcaagttttcactgaagcaattccatgttcctcaagaccaccctgaccccatgttaaaaatgcagtgtctgccaccccaacatttatgagcaccccttccctcccctggggtgttttcttgttgcttttcttatttgctgctccagtggctgaatcgccatctcagagcttcctagctcaaaacaatggcttcttcctgtcaccattatgtcccttaatgggctcagctaggtagttctgggttctctcttattgtgtaaccagacattagctgagcctgtaagctgtctgcaggaccaagtgtgtagaatatccaggatggctgtcactcaactaaggctgattattgtctgggaactcagctggtgctgcccaccagaacatcttcacgttgtctctctgtgtgagccacactttgtgtagtgtggaaattgggttccaagaggggctatctcatgaatgaacattctaagagacaggaaatggaatggaccaggccattaacagatgtttacattaaaggctgtaactaaatttgaaacagtaccaagcagattttagttactacaacaaaataccagagtcagtctacttaaaaagtggaagagcttgtcttgcttcagtctacggttgcatggtcccatgatatttgggcccatgttgagggagcacatggcagagaaagttcctgagttcatggtgactgggaaatgagagactgggagacatgttagaaagaatgagagcagaatgaagagagcaagagagtagaagaaagaggaaggcagaaggggaggacctgggatttcaatatcccttgactagagtatgccctaatgatctaacttcctcccttctagagtgcactaactttctccgttctagagtgtgcctcaatgacctaactttctcctttctaaattatgacctaatgacctaatttccttccttctagatatgctccaacaacctaatttactcccttccatagtatgccccaatggcctaactttctctcttctggattatcccctaatgatctaacttccttctaaattatgctccagtgacctaacttcctcccttctatagtatgccccaatgacctaactttctcccttatagattctgcccccaatgacctaacttcctcccttctatagtatgccccaatgacctaacttcctctcatctcttaaaagtacaactacctaccagtactgctaccagctggcaactgaccctttaaaatacaagctttgggggcacatatctaactcacagcacagtactcttctgtgctatgacctgttccatcttaccactggggtgagaggcaaggtcacatcacagaagagcatattgggggaggtgttgttacccttgttgggaaatactgtgtgccatacctcccttagtgtccatgcagaattaactttcatgtcatttcctgttgattgttgttaggtataagccctaggaagacgtaagcacccattcatgtgtatcaagcacctagaaccaggcctggcacataagcacacaatatgaagtaggtgttctgagctgccgtgttcagattgtttcctgttctggtgccgtgagttctaatactgctctgttttattgtcctctagtgctccacaggcaggcacctcgattccatacccctgtgtttcttggagtgcagtagggaattggtgctcagtaaaaatgctaaatgaataagacaaggtcaactggagctgagctctgaaggataaatgggattttgctaagaagaggaggggcagggcagaaggaaaggacaggtgaggctgtaatgaaaccggctgtggggtctcagagtctggcctgagctgagctggcctctagtcctcagctcagcactcctccacatgcttgctgaatatgcagatgtcaagtgtacaatccaatgtacagattttaaaaagaaaatgagtaagactagagaaaatcaataactcttgctgagataatatcttaaatacaagcttaataatgatacaagtattaacatacattcagattctgtagttttgaacttgctgagaacttattcagtttatatattctaatttgcagggaaagttctgcaatttacattcaaatgttggtttcctgccagttgaatgtccaagggaatctggcagaactcttcagttcgacctgaagccttggactaaatattccgagggaaggctaagttcttggtcaaggggaaggaagcaggtgtgccatttgcttggcttctgtgaaccccgagtgtggtggcagagggtcaatcaaacaggcgcaaacacgactgttcaaaaattaacagaatgtttgcaaacacaatgctataaaaagcaccatgccctttcctttgcatgtttctaaaccagtcagtgaaatgtcaggaaaggtctagtccatcctttcatacacttaaaactttctttgtatgtttgcatatgtgcacaccttgtatgctgaaagggggtctctcactggatcccaggactcactggctcacctacttactgtagtcaaccagcttgacttagagatccatctcctagggatctatctccatctcctgagtgccttgagttgcaagcattcgtggggtgctgaggatacaaattcaggcactcatgcctgcctagtgagcactttaccgagccaccatcctggtcccatgcatctttactttgctttagataggttctcattaagcagatctgggtggtctggaacttgctatgtaaactaggctgtccttaatctcatagacactcacctgcctctgcctctgcctcctgagtactggggttcagggtgtgtaccatcaacccccccccagcttgtgttgcctggttatgaatacatgtggctcgtatttttcatccgtactggagtaaaaagaaaccccaattatctccagttagatccggccacagttatattaaacgcccacacagattcctttctttatccctgttgtttataaaagtaccaatcaaagatgagattttgcgcagatgacgacgactctgagagatgtatgtagactcagctactgactttgattgctaagcctcagaacggcacctctaagaaacagcgtcagaaatgtagtcaggactggagacgtgaaacttccctcctcctgagctggcccagaacattcccctgcctcctgcctccaagagccgtggatggccttgaattaagcattcctgagaaaccaccctacctgatgctaccaccccagacacccagaggccctggggggggggggcgtccgctaagatgagccagtaagtggtggagagatggaagagagaaagaagcagaaagtgtgtgcccactaaaaagaggcagaattggagactcagaactggagactcgagggtggtgggaacaacctgatgtgagacccagtgatgctgtttgaagccatggtgaggtcctggtctctgctgctgccaagggccaagtcatgcatggtttgtggctctggagtgggggtttattattaccaaagttcctggtcttggctgctgcctggtgccatgctgagggctgtgtagagctggccccacccctcaccagctgcagcacacaggaaagcagccccacatcttgccagggaagcacagttgaactggccctgatggcccccaagggcatgccagtgagagagctggacctgcccattgctggctagggagctctagtgagctggctctgccctttgccagggcagggctggagagctgttgggaataggagagctatcaggcagatcaactcagctaccacccaggccagatccagggctttgagttggcccaccccaacatctgctctatctatgaactgctggagcatgaacggctggccctgcagacccaaggctttgagatctctcagcacagtgcaccaacaggatatctggcaggagtcccagtgaggatccagtactgatggtgtagcagaagccagaggccttgaaacagaccaatggctcattgcaatgaacatttgcaagtccagccttttgggcaacgggtgtgtgcactgcgtgacgcaccagtgactgaactgcagctctcatagtgagatttttgtttgtttggtttttttttttgggggggggggtgttgtggctagccttggggctaattacatttgatgttaattctgttttcctgtgaggggctgcgaacaatgaatgggtcagcactcaggtgatttcctgtatatgtgctttccaccttaattggtaaaataaaggagagctgatgactgggcagataaaggaaaggtgaagtggaaggtggagagagagaagaaggggaaaaatgaaagagggagaggacacagaggaggaagaagaagaaaattggagcagaagcacatggcttgtagaaaccacaagttctaaggggtcttataaatgggaaagatggtagtgtatcggtagatctgcccaatctaggcacacagcatgtattcatattaactgagttgtgttttcattgccggggcatatttgggttggagatttaccacaacagggaggttgcaaggatggagggtagatatggagggatcgggagatgagtgggatgggggtgcaatatgtgaattcacaaagaatcaataaagagttaaagaaaagaaagcaaggtggaaccatcaagatggctcatgggtagccaggcatggtggcgcactcctttaatcccagcacttgggggtgggggtggggggcagaggcaggtggatttctgagtttgaggccagcctggtctacaaagtgagttccaggacagccaaggccacacagagaaacctggggggtgtggcgggggggggggggaaggagatggctcatgggtaaagatacttgctatctaacccagtgacctgagttcaatcccagaaaactgacgcctgcaagttgctctctgacctccatatacatacacagacacacatacatgcaaatgaataaattaagtgtaaaacaaaacccacaaggatggtgcatgagaaaagacattcaaggttaacctaaaatggacacacatgctctctctctctctctctctctctctctctctctctcactcatacccgtttaacatactctcatatatacacacactcacacacacatacactcacaataccctctcacacacttacatagacacactctcacactcatacatactcccacacacatacttatacacataaacactcacacacatacactcacacattctacatagtcacacactcacatatgctctctctcacgcacacttacacattcacacacactcacatacactcacacaagtgcttaataagaaatgaatgaatgaatacataagacacacaagactctgtagagactcctggtgtctcataattgggaagaaagctgaatgggacttgcatgcgacataagctcaagaggtgcccatggatcctccatgggaacaacacacaaccccagaaaagacttggggtgctgttttcaccttccttgagcttcctggaagatcacttcagactgtccatctgctttaaaagctaatatggctggaagccccagcgagaccgcgacagcgtgttcatgtggcatatagaatatctcctgttgcacagaagatactacagaatttttggtgcagctgaccagctgtcttctaaaggacaagcacaaggcactggtggcagatgtcagtgctgacctcactgttataggagggtcttaggaatgccacctcagcggggtatgtggtctaacggcagtcttgcacctcatggaaagcaagccactcttaaagtcacagaacacacaaaagccacagatcaagaggtttcctgtaaatgtttctggggacatcaggaagtcaggttatatcaaaccagaaaaatctctgctgtggtctcagacgccatctgatggcagtgtgagctttttaggttgtggaagctagtggtctgattagttatatcccccacattttatggcggtggacaatgaatggatacttctgggactatggtatagtaaagcagtctggctctggatcagcagggttctaagtctccaatggctctgccacagctgatccgtgggtcttgtagagtctttagtgtagatatagcttgtgttctgggatttcagctcaaggagagaacattgattttctataagatggagaacatcgattttcttataagacttcccccagtgaggctgcatgccccaaccttccccaaacaggaccaactagggaccaagtgcaaatgccggagactggaaggtgaggagactggtggagaagcagggcagtcccaggagccttctgtcttacactgcagtggctgacaggtccccttgctttgcaggaggactggcgctggcccaagtgctcttcttctatgtgaagtacctggtgctctttggtgtcccggctctgctcatgcgcctggatggactcacgccaccacctcttccccgctgcgtgagcaccatgttcagttttaccgggatgtggaggtcagtctcatggtttgcttacgtctttggggtgtgtctgatgggcttggctggctttgaagagtttggctactgttcttccccttcactgaaacacgtttggaactacgtattccctttcttgctaatatgatggcagtcttgctttctgaccctcaacgttgtcaggctacagaagtaagtgaggcaagagagactgtttgcccccacacacaggactatgtcaggagtggtttcttactaggggcagtatattagtcacttatgccatggctgtgataaaagaccctggccaaagcaatttatgggaaaaggcttaatttcagttcactgtctgagtgtaaattctatcatggcgggaagtcttaggggcggagcttgggaggcagctggtcacattatatccgcaaccatgaggcagacagcagtgcatgctggtactcagctggctttttcctttttatgcaatccaggatccaacccaaggaatggagtcacctccttttagagtgggtcttcccaccccagttagcttattgaagatagtgtgcctgcaggcttatctcctagatgaaccaggatgtggtcgagttgacaaacatcaccacagacatgccgcgaggtcctccttactctgctttctttgaagacgactgtgtgagtcacactgttaactaaagacgagtgtaatagcccagggcagcactcgatgccatacactcatctcagcccgtctggtccagtcttcctattttttcagtaataataataagagggtgtataatctgtctacagaagttcttttgaagatgaggcaagtcacagcaaatgtttccagacgtcagccctcaatatgtgttattcccgtgtgaggttttgggcgatggcttgtgactgatctttctcgggagttttttcactttttctgcttttgtcccacaaacttaagattggcctggaagttttgttcctaaagatcccccaagtcccttgtcatttctgatagctgttttccaaaaggacttgtttgcttcgatgtttttctgagcatgtccagtgtgaagcaagggtcaggattgcttctgtaattgcagaccccctcctggaggaagcttagggctgtgggggttggaagagggacaccaactcagcaaggggatgtcggtgcctacttaaaacttgctctttggccccttgcttgtttctctttagttctggccttgctcagagctgtagacatgagacccaaggtagaacgtagcaggtgaatgtagtgaatgtcaccgtatccagaggagctcctctgcaggacccaggcagcatgcaatgtagctatgtgggtacttgtggaatcacctggcttctttatgcacagtttagttgagttccagcttgctttatggggtttcttctagttattgagggactgctaagcagttcccttatatttccttcattatttaattaagctccaggctggattttttaatggcaggactggggaatgctggcaaaggggctcttctcagggctgggaagtagcttttgttaagatgaacctcactggaagctgttataatatgactgtctcagaaaggtcacttcctcagccaatggtgggaccaggggtgatttgggaacatgtcacagacatctggtgggaagcctgcatggttcctctgcctctctgttgtgaccatctgcactaatgtactggaaaggacatttcctgggggcttctacagggtcagctagagtggtaaccatggtgacctgggcagtttccttgtccataggtcactggttgccacaaagcctctgtgtttcatagagtgaaacagaatggctgtctgtttttgttttatttaatcaaaattttaattttttttttttttttacattttaagtgtgtgtgtgtgtctgtctgtctgtgtatagttatgtgtacaagagtgcaggtgcccttggaggcaagaagatacctggcactggatagagtgaggctggacttacagatagttgtgacctatgtggtgtgagtacggggaaccaaatttatgtcctcttgaagagcaatctgcactttgaactgatgagccatctcttcagatcccttaacttagttttgcccaagaaagatcctcaatttatgtgagccacaaagatggagaaaacattgtcatcatcagaacagatggttgctcggtggaggctccaatgtgtgactcctcggaggaatgaggatctgaagggcatgtacaggggcccttggcaagaacaaccaaccaacaaacgaatagcttctcctctagggctgctttgggctcccattctaacttctgtagcatgcaagactgggaagttccttgagtttttgtaggcttattgatttaagcaaatgctcatgtgtatctgtgtgcctatgtgaatttatgtgctctgtgtgcacactgatgaccaaagaggccagggtgggggaggggcaccggatccctgggactggagttactggtgtttgtaacctctttctgtgcaagctgcttgatgtgggttctgggacctgaacctgggtcctcctgtagaggtgctcttacttacagggtctgcccagtcctgtgtttggttttgttgttttgttattgagacaaggtgttactatgtagcctactctgattttgaaatcagcttcctaattggcaggcaacaagtttcttcccagtttgctagctatacttagaagcgctgggtctttttatgttaaaacagccaggtttcagaatccaagtgaacatctgagacatggtggccagggcaagtctcaggagaggctttttaattgaagaagaacaaagctgctgattatctttgtgccatttgcagaatgtcccttcctcactgggaggttttctatgttgtgtgttggtgtgcacatatgtctggtgtatgtgtatgtttgtgtagtgtatgtgtatgtatacatgtgtatgtctgtgtagtgtatgtgcacgtgagtgcacgtgtgtgttcacttacgtggaggccagaggtaaatgttgggtgtcttccctagctgctctccatccctgattagctagactggctggctagccagctcaggatatgcctgcctctgcctcccatgtattacagttgtagacatacatgaccatacccagctttgttctgtgtgtgctggggttgcaggacaaccaaatgtagattgtcctgcctgtgtggctttccccacctagccatctctccagaactggcttatcatgttctgtgttccctgtctgagcatacagtctattaaagtaaggcaagttgtgaagttgtgatgtctgctatccaacttcactctgatgtttctgggctgcaacccaagactgtctcccgcttcctgagtctaagaggaatttagtcaggagcagagcagaaagctggtggggcacctgtttgttaaggccatggcagatgggagaggtctataacgatctcccagaggttactgagtgaccctcaaccctctggaagtagatactgaatgaggtttaaaaccagcgatgagacggttatcagtgctgcaccttaaatgcctaacaggagattggctaaccacatcatcttttggtgcatttctcagtgaaggaccctgatgatgtcagcctgcagcgccattggattctgagctttgcgtcataggacagatgactctggccattggcagacaggatggtttaaattgtccatgaagaattgctgctctccaatgactcacccctatagttgggctctgatgggtttattcacttccatctctgggttccctccttcatggatcctgttggaatatttgcaaaaatacattgcaaagctccaaggagcagctgtattcccatggtgcgagttttctgtggctctctggagctgagaaattgaaatttctatggtttatatctaggtttcatgctttaatttagaagagctgagatctctaatgagtatcttttgccaagagtcattaaggacggtgttgcgtgtctgaggttccacattaacattctgattgtgtcctgtgatgtgatttctcgctatggaggtgaagtgtgtgtagtgataggatttcccatagtggctggtgagttatgggtcaatttcagttatctctagaatctgagtcagcttgccctccacactgcttgaattatgatgctttcccaactctgcgggcaaattcaagcatcatccgttatcccagaggaatctgggtagtggttagtggggggctacattttaatgtgtgagttcatttttaggctgaggaggaggaagaggaggggcctgagccctgttctctcagtggggcatcaattttccacatggtaggtcattagaggagtttagttctctcggtggggtgctggctcttctgtgaagtggatcatgaacccactgatgaagacccagctcaggcctgaataatgattagtctgcagtcgtagggcaggtggcgggcatggagttggtgagatgtatgccatggtctcccagcatcgctttgtttgtaaaacaaaggctaggtggacctgaagaggcaaaggtggaacagaatgtgtttgtaagtgctcaccccatccagagggaccctggtctccaagagcttgctcttcaccagccgtgaagttgtttatttctctgggccaattattctatcactaaaaggaggacttgtcccttcggataacgtgatgacttatggaaatgagcatatagtaggcccccaggaagtgataactttttactgttttagcgggagctgttgttgttaagcctgacaaaaccagaggtgacctggaggtctacctccttctgggccagaccctgcaaccatgagtgctgaaggggctggctaagcaaagactccatccagctgggaaccaaagaagtcatgattcagcagagtgggcagagcgtgagctcacagatgtctatgttcctgctcaccagctcagccacatggaagagggatggctaccaatgtcccattgcattctgctactcatgtgatttgtcaagttagtggcctcagtccacctccttttttctaagaccctaaaatgggctgatctcagcgcttgctttggcaggctgctgtgagggttaatggagaccagaccctcaggtagtggacacaggacaatcatgaaaatactagctcagtgttatcggtactgacagagtcaagtttagactgtgcctatgcgtttttacttttccagtaaagaaagcctggaagggtgagtggtagcaggtgtggaaagcaggtggaagatatggttcaaatggaagcactatggtccagggtctgtccaggcattggttattattatcaatgaacacatttgtaacagtgttattaatgaacacatttgcaacagtgttattattaatgaacacatttgcaacagtgttattaatgaacacatttgtaacagtgttattattaatgaacacattcgcatcagtgttattattaatgaacacattcgcaacagtgtccagccatggacactgtacctcacctatcttgcttcattcactcaacccttctctctctgatcctcactcacagactcgataaactcactttctttcttcgtttttaaaacccctttctctttttgtctgaatacaagcttccatagatcaaagtgggaaggaaatgcagttgaacacccttttgttttgcttcctggtttgtttggcttcgaaggctgtcctttccatttccctcatgtggaagagtttttggtatctctacaagctctacagttgactgaaggcttctagagtaagaagccatgtggcacagggaataccaggcgtactggctggttttgtgtgtcaacttgacaggagctggagttatcatagagaaaggaacctcccttgaagaaatgcctccatgagatccagctgtaaagcattttctcaattagtgatcgagaggggagggcccagcccattgtgggtggtgccatccctgggctggtagtcctgggttctataagaaagccagctgagcaagccaggtgaagcaagccagtaagtagcacctcttcatggcctctgcatcagctcctgcctccaagttcctgccctgtgtgagttcctgtcctgacttcctttggtgatgaacagcaatgtggaagtgtaagctgaatatatcccttccccccaatttgcttcttggtcatgatgttttgcacaggaatacaaaccctaactaagacaccaggtgttcttcatgtggagggcattgatccccagtcttattagtcaccagagtatggtgtttggggggatgggcaggagcccaatccacaccggacttcctgggcatgtgtctggtttccctcaggaaatccatactgaatggatggatgtgaaatgtctctcacatgcacatgtgtttgaacacttggtcttgggctgatgccaatgctttgggaggtggggcctacctggaggaagcaggtctctgggggctgtcctcacatttatagctgtccctgcttcctgtgcaatactgactccctataggctgtgtgagcaaacaatctcatatttctactgcggcagacaggagctgttttctctagcactccttaccgtgtttccttgccatgatgggttctagaccttcaaacagtgtgaacccaaccaaaccattctcctttcctttccttctggtcacagagacaagaaagtgagctcagtagatcatgaacttctaaaattctgaccaccgggacttaggagcaaaaatgccagcattttgctgtggtgtgtaagtagtctttctgtgtgtgctatgacccatgcctgaagggtgtgatatacattatgtatgactgctgtccacactcagccttcctcatctcctggtgtgtaactggtccttctgtgtgtggtgtgacccacccctgaaggataggatacacaccgtgtatgaccgttgtcagtactcaaccttcttcatctggtttccctcatcaggtgctcacgtggcatgtcaaaatattatgtctaccttcaattttcttgagaatgaatgcactatgcagggagtctagaaggaggagtgggtacacctgccttaattacagttctcatttcaccagacattatactatgccacagatagtaggtgagcgagggagttgccagctcaaaggaagaaaagacttcccattcagactctgtacaagagaggagtctgacagctgctcatctttggggttgagatttttctaaggcaagtgctgagagaaaaaaaaatctaattctcttacaagtgaagatgaggaaacctgatatagggttgggagtaaaacccttctacaaatactgtggaaacagctagattctggtaatgataacagcaatggctgcaaaggtgtagctcaggttctgctaagacagttgcaaacactttcacctgagttatatctccctctttatctgtctctagtgatgtgggacagaaacacacttttctgtggactagagtgtgaggctgtgactggatgtgggattcaagggaccagagaatgatgttggcttggataccaactcccttgaaattctgtgtggacatggtagaggagggtcaagttggcagagagttggtttgtaggcaccaaggagtgagaggaagaggctgcccaagtcactgactgggcggtgggtggtatggggctgttgagggcttctcccattaggataggaacagggatctagagactttctggaggtcggagaaaggctcctctgatgcccacacagagacttaactgtttcttccatgggtgtctcctcctacatcccccaacccttacctactccattcctctgtcttactcagcccacatctaatccccaggatgtagaatgtattcagcaagttggcctcagaggggaggcggagagcctggacaatataatcatcttctgtgttgttccattccactgttcactgtggacgaagggcagctttcgcttgtgacattctccttaggaaaggagcctcgtatttcagccctcaaaggtagaatgagtttacttttgctaacgagaagaaaaggactttaagattggacctgaatttgattctgtttttgtgagccaccagatcatgaccaggaactagggattgctaggataacaactgagagatgaaaacaaaattcccactagaatgagctgattctgtgtactagccttgtaaaataaggatgaatatcatcagagaggctttcacacagcccaggtcacgtggttgttagagagactgttgatgaataatgagttttctaagagatgaacattcatgcattcaacctcacgttgggtggttatgccgcttctttgttacattatgaataaatgtaaaattctttatttaattttatttacatgaatgtgagtatgtctgtgagagcgcatttcacctgtattcatatacctgcagaggttataagaaaatattggatcccctagttgtagacttagaggaggttgtgaacggtgtgatgtggtgccgggaactgaacccagatcctctgcaagagcagtatgtgctcataacttctctccagtccccaaagcagttcttggcaccgtttcttgtgtcttgagactgctgattggcttagcctttggtgtgcttgctttgtgttcagatccactcaccacctttactcccgttcacctgggtgcccaggtgttcagtgttacagtcctggatacaagcagcattctctgatcctgtctgattgcttcccaacatacaatgttaatcctttgtcttctaagaagaactaaacagtggctaacctctgaggtaaagattgcatggtgtctgattgttctgcttggaggtattgctttatttcttggcgtggtgcacagcttgacgagctccagaagtttcgaggtgaatgcttaggtttggggtttgggaagctcattttgcctgtctttcttgggtggtgtgtttaagcgacaccttacacatgcgtgattttgcctcgttaatgctgaactcatgcccaactgcatggaaacttgggcccgagggagcacggacattgctttcttagataaagcacatcagggccttcttgtgcttaggaacactacacagtacttccatgctgtgcttgggggacagtgatatcacacccccccccccagaatgcaccaaaatgtggcatccaacagcatagtgagccctctctaacaggtcaggagactcaagtttttggtctctgagcttgagtaactgtacaaatgttaatttggaggtatccatgggttttagtgagcagataaactcataaatacggcatcctgggataatgagcacggattttcaaggtcaccaagaaggtcatatgcggtgaagacttgaaggaaggcatgagagtcacattactggagaggtgctgcaggagagggtgcagccagtggaagggccctaagcctgaggcatgtctaagaattgcgatggagcggtctcggatgccatcctgtatcctttgtttacacatttcatttagatggagagtgcgggagggcattgagctatggggcaggtatactgtgtggaagcagtaacccagagcccagccctgagaatgctctcaccacataaaacactactaggctggacctctgacgtcccaccatggctcccaggcatatacggggtccagcatcaggaacctggatgtctttggagagtcaggaggaaagctgaatcctggggctgtggtgggcaaagatcttggtggctgaggatgagctctcggggttaatgatgactaccatgaggttctaggggtccatgagatggctcagtggataaaggcactgggtctaatgttcctaaaatttcttcccaaggagagacatacgccatatttgccccttctccaaaggtcccaatggcaaatcaaagcacaattccaccaaagtccaccaaatttcactctaaagaatcagtaaactctattgggtgcccctagagagcataggtgaaaggttacttaaaggggtgtgggtgctcccccactaatgactgtgtctggaaaaccctactcagcgaggatcagagtgtccctgtaaccactgagatggagccccctccctctaccccctccccaggccacatgtagagttgccagttagtagggtgcagctggatactctgggcagaggtggggcttgcaggtgacaggggaagcaatgggggaagatatgtaaaacagctgcggtgaccatttccaaggcagactcagctatggccccaagatgtcagttgcttggctcagcggacagtcactcactgatggcctgagtctgatttccagtactcacaccacggaaggacagtactggcttccacaaattttcctctcaactctgcccacaacccaaattaaacaagtatgtgtttaaaagggctgaagatgggctccagcttagggtggactagttgaaaaattcatttctagaaagccctgacgacgttaatgaggcaggaacattggcatgattctaaacctagggtgccagcagctaggtggttttcctgggtaaaaggcaattgggtttccttacagaattttcctttttcttacaatcatggtccagttcttaagacttcgaatccttttactcgctttgtgtggtaagaaaaaggtgagacagatctcctgaataaaggtgtttacatctgaaatcgagtttggaaatgattcaggtcacatcccggagttgcctgagtgactacagaaaacacttcaaggcagcgtgttattaaaggcaggtgcaacagagctccgcctttaccgtgtgaacttattagcatttcaggctgatacctcttttagatttaattagatttcaggcttcaatccatttattagatgaatttctcactgcttaaagggtgtaatgtgctcacagcagtggcttctgtgaggccccttctcccttcctcacccaatcaggcagatcctggcttctggctgattcaaagccagaggttattttccaaggctcccacactgcataaatacaacaacctcttttgtgattgcagatgcttgggccattggcttttgtatccacctcactgtgccctggatgctctggtgggcttactaacagtaaaggtagcgactgtgtaacaatagccaccttctggttcagaggcttttttgttactgtgaatctgtctacagttattttggtgcaaagtccacaggcctttatttctactgttaggaaggtgttggggctgtgtagatagtaggcaagcaagtgtaatgtaatgactcaagccctgatagtgactggcaagacaagctggcaagcagggtaccagctgtatgcattgagcaatgtgctgagtttatttaggagttttatggccagtgtctgtgaaaatgcagctctcacctcacaggatggtttattctagaaccaaatacaaataaccacagcctgggaacacagatccagcttttctcgaaggccatgttccaaggaggtagcaatcttacaacattaacatagaaatagaacaaagaacattatgaatcaatagttctcaaatacatgggtcaggtggtgggttatagcaaactggggacagtctgctgtagttcttgttgctttctgaggacacgcttagcttttgggttggtggaagctggcgtgatagtcacaaggccattaagtcacaggtagaggagaacaatgactattcaacagcccaagatagcaaatttttaactgggccttggacttgcaacattccaacctctgcacagtcattgaagttattgaagttctaactagcttgtgtaggatggtcgtcgaaaatgtatgtgttcaaagaacttgcatctacactgtgtgagctcaggctgggattgtctccctctgtgaagggaaactctggaaagctttttcttccaaggctgctggaggtctgcttcagcttagtggctctttccaacttctgctgtgtgtctgtctgtagggtaaggaaaggcagcgtgaaatatcaagttgtgtttagtgactatgctccagatcaataatgtttataacacaaagtagaagaaatggtgttagtcgatgtattttattttctaaatgaactaagtaaggcctcatgtgaagatcagctgtggccatctcagtcaaggaagtggtttgtttgttttttaatcatatgtactatacatcttctaacatataattttgaaaatcccactggaaaaggcaataagatttaacaatgaaggtggagaatagaaatatttctgtcatttacaataaatactttgccacggtgcaaaagctgtgttcagatttctgggattcatggtgcaagagttaaccaacctttctacacacacacacacacacacacacacacacaggtgcacatatgtacacacacaggcgcacatgtatacacacaggcacacatgtacactcacgtgcacatgtacacacatgtgcacatatacacacatccacatatacacacttacagtcatatatgtgcacactcagacatacatgtgcatgcacaattgctcatatgtatacacaaatacacacatatgtacacatacacttggttgagaagcatatcctagtgataatttagagctgtggctgattagtgggctcatctttgaggagatgactggctttatttttgcaagaccatgtatggaaggtgcaggtagaagtgggtgagctctaaagaacatgagcttttccacctgtagatttgtcatcaaggaacactaagttagtcccctagagctcatttctctgggaggggagtggaagtgtactagactgattggattggcattttagggtctctttatccattccctcaacaatgttgagtcttaggcctggagaggtggcttagcagttaagagtacttatctctctattagaggactagggcatgtattgcaatatccatactaagtgactcacaaatgcctataactccagcaaggacatgtgtttatgttgtgtatttgaacagtgataatataagaagttgtatgacatttcctggggagatatgaacagaggggctacttataggggcatggattcttaatgtagttgcattactgaaaagcccacctcaccatgggtgatgattcatgaaagctgcatccctgaagctctgtacataatccacaggcagcatgacaagttaagagtctcttctcttcccagtagtccttactgtttatataactgaggatggaggggcctgtacatctggtaaattttaggaactctctgagacttgtaagttgtggcctttctgagtcttaaggatccctcatctgggatggaactgtttcaattcagaagttatcacacatgagagaaatgcatcctttttagggtatcagactggaggcatcttatatcgcactgttcttactggtcgtattaattttcattattcagaagtactgtctgatttactcactttctcaaaatcattttctttctttccttttttcccccttacaactaaagagcaagctacaggagacacttgggaggccacatagataatcctggtctttgttaaaattccccctagatttgtcttcagtgttaataacttgtatgactgagatggtttttattgatttgcaaaatgttgatatccagttttggcccttgccagctagcactttgtgttctgtagtaaacaaggtcccccacaatccatgtgcttcattatctggatgcccctcttcctgtcttctagtggtttataattcattactcctctaaagttttagtgttcaaagtgtcccctcttggccagggatcccatatactggcttctgtttctgtggacatgctcaaacattatgtgagcaagattcctcctgtttacaaatcttgagctgctaattaccctactttcttgttcagtttgggtcctgggatgtctgtgtgcagagcagaaataagatacaatgtgaccatgaggcagaaataagatacaatgtgaccataaggcagaaataagatacaatgtgaccatgaggcagaaataagatacaatgtgtccgtgagggttaagaatctctgctcctcattgagcccaagtgtgagtttgagtatcttgactcaggttgagtagcaactagaacaacaacaacaaaatagaactggtagaatagaacagaatagaaagggagcgagaatggaggaggaagaccttctcctattcacaagcgtaaggacctgtgtaaggatgaagaacatgcttgcacacctggcatttgatatcagattttgtccttctagaacagagagcatgaaattctgtaacctggccactccgcagcaaaccttccctctgctctgtgagctcaggcttgtatgcttcttctctgttttgccctggtcagagttttggtccaatctgtctgtgtctttgcagttgtttagtaacagggccccaacagagttgactatgtgttgcggtaaatctccaacccaaatatgcccctgcaatgaaaacacaactcagttaatatgcacatgctgtgcacctagattgggcaggtctactgctacactaccatcttctccatctatgagaccccttagaacttatggtttctccaggctatgtgcttctgttactcttttctccttcctcctcctctgtgtcctctccctcttccattttctcctccttccttctttcaatcttccactccacctttcttttatctgcccaatcatcagctctcctttattttaccaattaaggtgggaagcacgtttacaggaaatcacctgagtgctgactcattacttgttcacagcccctcacaggagaacagaataaacaggaaatataattagccccagagctatctgcaacagcaatatgagctctagagccctttgggtcacaggccctaggctgcaagctctctgtggtcctgtattctcagagggcatttgataagttatctcatagtgtctccgtttcctcttaatgatgaaaaaggggagtagaattaatacccttaagattttcgtcatcttcaaaagtcaataaaggtaggggctttaagtgtttgaattagtgacctcttgtttttgtcttggcccatcgtgatggtttctattaatggtcaacaggatttagattccttaggagacgagtctgtgggggtgcctgcgagagattatctagagtaagttgaatgaggtggacacacaccttcattgtaggtggcattgtcccatgggctggagccctgggctgaataatagggagacaaattccagctatgcaccagtacccactgttctgtgtcctggctgtggatatgatatgacagccaccttcagctcctgccaccagacttcctggaacgggatgttctctcgaagaagtgtgaactcaaataatcctttcatccctaagttgctcttagtgtgcatttcatcacagcagtgagacaggtaatgaattcacccagcaatgctaggattctgttcctgtgctccatcaaatagcaggttttcatgtctttttccttgtttaatcatttttagccctctaaattatccccaataattgaaatataatctgggttttaattaatgcatttgctataacatagagcatgcagatactgttctcacagtaaaggagatgcgtttgcacatctgctgttaatgggatgttttgaattcttcccacgagtacattaggctactgctcactcatgatgaagccccagcaagcttcttattcctccactcagcatgaaggattgttctggagaaactgaaagtgctattggcataattaacaatcagagttgttattagagatgggcatctgctcaggacccagatatctgtagttctgggtccttgcctgctggacaaggtcagggctgaccaagcatgtattgattggagtggacaggctgagttcccgtggaccttgtgtgtgtgagtgtgagtgtgtatgagtgtgtgtgtgtgtgtgtgtgtgtgtgtgtgagagagagagagagagagagagggagggagagagagggagagagagggagagagagagggagagagaaggagagagagagagccagcgcaagcccagggcctctgaatatgctaggatcagaaacacacatctaagacattgctgcaggctaagatcaggactcttggttctcttcttggttggcttgggcaacaggcaggcgagtgcccaactccacccccagctcccgaaccttgcccaagttgttcccctgaaggaaaccttgacttgctgattattccacggctttgaaagctgctgtctgttcccttcaacaaggaagaaaccgcttgcctctgaagactgtggaaagcagggtaattaggtccccagtctctctcaactcagagtcacataattatttaaaattgctttcacctcctggtctttatacctgccatgcgagctttcagattccactccttgcaagttcagatcttagtgcagagggacagagcaggagaggatggaaggggacagaggctatggagtgcatacctgttggcagtgtggaccatcaggtgctgcaggtgagaccctccctggcaacagaggtcagttgactgaggctgggagcctttacagctcagtgttctttctgcaaggggcccaaggtgctgctgagagcagacctttacacagcaaatctgcgggagcaggccaccaacaagggtagccagagtggcaagtcacccctgtcagagcagcaggaccatgatgagtgctcacccaccaaggactttcagaatgggagagcatggcttggaaaaaccgtgccagaagcattgtaaggaaaagcagcaaaaaacaacccgagtttttcccccaaaggagggaggacgatatcagggtctcctgtagacgacccacaggggagtatttggcttcctgccttgatttcagagaatgactttcagagtcacttgattgaaaaatcagaggtgttctgaaggagggttgaacatagtcactacatagccggtctatgatttctctaacaaccaggaagcacttgcatgtttcagtatgtgtttggggtgtcaccctgagagggatggagagatggggaaggaaccatgtgggagtcattggagaaagtgctcagagcttacccactccaaatgctgccacattgccatattgattattttgatccaaaaggaattggttcccagccaccccatgaaatacattttatttctcctatactgattaaaatgagatgtaaatttctactttttcacaagaagttttcatttacaaagcagttttttcataagcaaagtcatctgaagtggaaagagagctggggagttcactcacctgaagctctcatcttcctagctggtttcctgcatttagcatcaattttcttcccttctcttgatttgcctcctgacctgtgcaccccggctcctttctacagcttatcattgagtcttttacttttgtgagattctgtgagatgtatatatacacatatacgtatataattgtatatgtacatatataattaatttttttctcctgctcatctgttctgtgtcacttcaaattgaccagctaaagaatcagaaggctgcaagtgtgatattgttcttcctttgcccttgagaagtttcatgtcaggagttctaatacataggggacactaagaaggtcgcctggctcctcctgactggcatttctcttcccacctgcctgcttacagattccccatgtcactctcacactgaatgaggctttgctgaggctgcactggcagctgtccccagtccccacctcccaccccttcgctgatattatcatggctgcccatgcaaacaccacagcttcacaccaaaggaaacaagaggtagtttattctgaggtcaaggcccaggaagacagctaggtcaccccaggtcccacattcccacatggaagcagtttcctgaagttttgtggcagcagaatgaagaaagccataaatgaaggcaactgtaaaacaaattggtaagcaatgaaagacccacaacgtggggactcccccatgttctgactcaggagaggcaacaccccaaatcactcacaagaaacggttttgctgcaaactgcaagaggacttttattcaagagcgctctcgggcccacagtcatacactacgcaggggtagaggaccatggcgccccaagtagctgggtaagggggcatttaaaggaagaaaccacaactcaaggaagtggggagggtgttgttggaaaataccaaagatacaagttaagagtcccaaggaagtgcaaagtcacaagagtcacaaggaatacctggtaattgttctggttatctctcaagacagtttctaagagcccctaacaatagcacattctttgaatgaacactctttgaacccaggaatcgggtgggtggaggaatgtcgctatctgttttatgattagcataccttggagcattaagtcacagaggtcacattcccaagcctgggcctaacggcctagaattttgtttttacgttatactttcagcacatcagaggagcggggtacagccaggcagattcctcaaatgttgtctgatagtactcttagccattctgttggtggagaataaaatatttttatgtttatcaggatggtaggtctgatagagaggtgggcaaggaatgtttttttttgggggggggggcgctaaagatagcccaaaataaattatagttaaaatacttggatgagcagcccgctaagctctcatagtcactgaagttcatcaggcatcagcctgtggagacagtctttctagcagtactgtagcacctgcctcccctcaggccctctcctccctgttttattgtttcttgtctgtctgtctttgttacaaaggactgagtggggatgcttgtctgttttatttactgatgtgtgacaagagccaagtgaatgcctcatgcccaggaggggtcagtggttgcttattaaatgaataatgaacgaaatgagtttgggtaaaccagtcagagacttagcaacaaagccaacttggaagcctggaggaatctccttctcaagtacagattaaggaaaaaataaaaatgaagcctccatactcaaagctgaatgacaggaactgcacttgcctgaaaggttctcaacaagttcaattggctaagaaataccagccaataggatttcttctctctgttgatgattctgcctgattgactagcggccattgttacctgtttctggcaccactttatttaagtgtcatgtgagttattgttctaagatgtgctgctctgcaaaggttttgttgttggttgatgtttcttgctggccctgaggagctacgcatggggaaactggtggggttggctctggtaaagggatgggagtggaagagaaaaatcagagccgatacgagagtgaagttgggcttctcggaggaggaggatgagtcattctgaccctgccagttggactctatcacagttgtcatctcaaaatgaattagtttattctggagctattttgaatgaccatggcccggaacacagatttaggctacccccaattcgatgttccaatgcaaaagtggtatcatgaagtttttatagttttataggacaaagaaagccataaatcaaggcaatttaaaatacattagtgggtataccaggtggttgcactaagacagggggaagtattttgtaggcccaagatgctatctgatgacattcttagctcctggattggtggaagctggtgttctgctaagttaatggcttctaagaggtttttatttattatcacaagatgttagttctaagttaatagcttctaagaggttataacttattatcatgaggtgttagttcagagacagagaaggctgatccagaggctcaaactagcccaagaaaaagtaattagcctctgaatctacaaaattctagtgtctctacagaagtgaaattccagtggatccacctatcttggcagacacagactccttcctggaggttgtttgtttgttttattcacagtaagacaaagtctgtatgactgaatacacaatggctgaataaatatggataaatgttctccagagagagtaccagctccagttgtagcatcttgctttctcctccttggcttgtgttgataatgacatcaacattcggtttgcttttagccttccccgcctccccaagaagtttgtcagtttcccttgaccaggttcttctgtatgtcctttcctctgtagcagttggcattgagtgttgtcctggtaacactgtttgtgctgcctgttcggagcctgtaaagctgtggcgatggtcaggcttcctgtgtcaccatccatgaacccagagggtcacaggaggtcgttgactgctcaccctaggtcacattctcagtgggctctagtgcccttgtgaaggcttcaagttgttatgaggtcagctgagtgggcttgtcacagtgacctggttcttagtgatgcttatgttagtggaccctagcagccatagcaaactaggttcagccacccgttcttaataggccaattaaagagacaggcaatagtaaaaagcagagaaaggagattcattccatgtggccacactgggggtgggggatggggagaacaaatacaaagttcagtgacgtccttgcccagtatgctcatcttgggggagtcttgatggtgtactgagggcaaaggtgtgtataactcagtagtctagtcaagatgtggtcccatccatcgctggtctactataacctcagctctagtctttcctgctaggtggtctgacaactcctggggcattctagttcattccagttccttggagattatcctctcaatagcctgatggttgaaaggagggaaccaaatgtctccttggacaatcttctctcctggcaggatggttgcatcttctctaggtcctgagggaagttcagcttactgcaagcccattttaggaacagattaaccccaaggagttcatggtggatctgagatctgaccacaaggtctgtgggtcttgaaaccagacaagacttggcatctgaaccttgttctttagtggctaaccagggctaaccagggctaaccagggccaaccagggctaaccaaggctccattccatatgctcacagtgaagtttttcatgtgacatatggcctgaatggagtgaggacccagggataccctagagcagtggttccttcctaatgctgagaccttttaatacagttcctcatgttgtggtgactccagccataaaattacatagttgctactttagaactgtttttgctactgttatgaattgtaagtatctgatgtgtgggatatataatatgtgacatttgatcccaaaggggtctcaactcacaggctgagaaccactggcttagaagacaggagagagaaagacttgttaaatctgggatgaactgggacacttacaagctttaaagaaagaaaagctatttctgagcatctcaggggaagcttcaggccccagcagctgatctgctggaaacggtgagcacagccctgaatgagaggggacaggtctgctgaaccctttggacacccccatttgcaatcacctttcccaggcacggctcctaggagaattcctgagggagagctgtgcagaccagaaagctgaaacacaaagccaacccaggaatttcagtgttcacagaagtggctttctggccaaatcaatccccctaggaaccttcctatgcttaaaatccctgtgtgccctcaggaaaaactccataatgagactattactcacgagtaatggtctcgaggacaaggagtcaggacactctggcctgctggtggcattgcactggaaccttaaattgaggccagcggcatttaacctgagtgccacatcttaatttctgtcaagtgtaaactcaatgtgggaaaagactctgaagaatttctactactaagaaagggttccagcaccaagaattttacttttcaatttagaaaaacacttaatatatgaaattgaagaaaacatgtttctttctttttaaaaaaaaataatagaagacaaaaatagcaaaaggcacggacaggaacaaagttctacgtaataaactgaaagcagcaaaggtatgtttaagtgccttaccatgcagctgtgccttaaacccttcaaggagaaacacacactcacacacacacactcactcacacactcactcacacacacacacacactcacacacactcacacacacaatcacacacacactcacacagacacacactcactcacacactcactcacacatacactcacacactcacacacacatactcacacagacacacacactcacacacatactcacacacactcactcacacatatactcacacacacactcactcacacagacactcacacacacaatcacacacacacacagacacacacacactcacacacacactcactcactcacacatatactcacacacacacactcacacacacagacacacacactcacacacatactcacacacactcactcacacatatactcacacacacactcactcacacagacactcacacacacaatcacacacacacactcacacagacacacacacacactcacacacacactcactcactcacacatatactcacacacacacactcacacacacactcactcactcacacatatactcacacacacactcacacacacagacacacacacacactcactcacacatatactcacacacacactcactcacacagacacacacacacactcacacacacactcactcactcacacatatactcacacacacacactcacacacacagacacacactcacacacatactcacacacactcactcacacatatactcacacacacactcactcacacagacactcacacagacacacacacacacactcacacacacactcactcactcacatatactcacacacacacactcacacacacactcactcactcacacatatactcacacacacacactcactcactcacacatatactcacacacacacacacacactcactcactcacacatatactcacacacacactcacacagacactcacacacacaatcacacacacacactcacacatacagacacacacacacactcacacacacactcactcactcacacatatactcacacacacacactcacacacacagacacacacacacacacaccttgactaaggaggaggacaatgattatgaatcattaagtactatataggcttcagactgaatagcagcatttcctatgtatcaaattctggggggggggtgtgctcctggtatttacaatttatataaattacactctgtgtgtgtgtgtgtgtctgttttaagaagacctggtaagtgtagagtctatagagtatgctaaagatctagggtagggaaaagtcgatgtaattttgagcctcaatacagctttggagagagaagtccttcctctttgaatcctctgtctttgctgataaggtcttcaactgcttgactgaggtatgcctcacaatgctgtttaatccaaagtccattgctctgaatactagtcacggttttaaaatacctttgccacaatctccaagctggtgcttcacccagataaccaaatccatagcctagccaagtccaatcaataaaatagatctggaatatgggagaaaggtctgagctagaaggttaagtggatggttggttgcctacagaaaacaacttcagccttgagtctcccaaggagcctgttgctgcagccataattctattaaaatccatgagaagtttctgatgtgctgtccacatttaacttctctgtagcttgtcacactggttcgaatggtttccttcctattccccactccattctggttacatcatctaagaatgtttgtcatcactggtcattctttaagacagacacttggaattcagtgtgacccctccccctcccccctccctgtatgtggtgagtgagcgccagatacttgtcaagtcaggcaaggaaccaaaggaacaacactgcactcttgaactcactgaaggcctaacctcctctagcttttagtccgcgtgcatagagctagctctgtagccagggacaataacttcagttgctcctctgagtgaagtggggagccattatagggtttcagtggaggaatgaagggtcaagggatggttctaacttcttcattgaaagtggcctttcagccaggcgtggtggcgcatgcctttaatcccagcactcgggaggcagaggcaggcagatttctgagttcgaggccatcctggtctacaaagtgagttccaggacagccaggactatacagagaaaccctgtctcaaaaaacaaaacagaaagaaagaaagaaagaaagaaagaaagaaagaaagaaagaaagaaagtggcctttccaggatcagaaagagttttgaagtccaggtgctgaggaatcagaagtctgagtttagtttttaggtagaccttatactttttggtgagttggatgtgagggtttgggactcagagatgggtccaggtttctgggtggctgaaggctgtagctgctgtgacctgggatgggggaggccacagggaagcaaacccaaggggggatgaggagttgcatttgagatgtgtaaatgtgcagcagctcttgcacaccagagaaagtgtgcacacgagcaggtcggcaaaggccccagaggcaggaaagtgtctctggggaagcctaggcccatgggcagcagtggtgagaccaccaaaggtgtgtgtgtgggagactgggggctctgcttcctgagccaagcaagaatcagcaagtcatgctgggagtggggggacagcaaggaggactggtgtactggtgattaaatgaaaatcggtgtttgggaacagattacaatatagaaatgttgtaagtaaaaatgacataaagacacattattaattaatgcattaacatttcttaattgtttcagttcactgtattagctgtttgttcctatataataaatttattgcacacaatagatatacattgaagattacatgatagattgcatctgggacaatgtagatgttgcttaaaggtgtcgggagttaggaggcctgaatgctgctggctcgagtgctgtctggggtactggtctggtctggggtactggtctgagtgctgactgaatactgtcgatgagtgctggtgtgaatgctggctggctctcacttcaaatctgtggccatttcttacacaggggtgtgaggctgggtccaagtagaaaatacaacacaagtgcttgtacttgctgttaccatgtggcttgggaatgtagcctcaatgatgaataagcttatgggaatttttacctgtggataaacggtatcattaaacttttatattttttgaatagggattattatattcataaaggggtgccctacttcaaggaatcttgtataataattacaacatgattgttaatataatttgatatctcctgctgtgcaaaaccaatctgtcttccctgataatcctttttttttagagtaagtgactgaaaaagaacaaattacctttcaagtcctaatggatcctaagcagaaagtctcagctcacacagttaaaggggcagcagcaaactcagggccaaggcaaagcgcaggccactggctttcaacttagggccatgggacttttagaatggtcatttctatcatccgtgggtgcccctgaccagccggaatggaactccgtttacgtactggcccagcagccatgaatcctctggcttgctggtgttgaagtcagttgagggcattgttctccagctgcctggcacagtgatggctggagaagctgctgttctcagcaggcttctgggaccaccgaggccccagatttcaaggaagagcccccagaatgttgggtttgctgcactggctgccattaaaccgtcagcacccataatcagtgccatacacccagtcccaggctgtagtacgtgctaagtaagtgtttgttaagggagaaattaagttctttactcccaggaatacatttatacaagaagagcaaaatttatggagcaaggtgcttaaaatactgatttttctgatcctattgactgcagtaaaactgagttttcctcatgacaagtgcagttgagaatgttaagactagtcacagtatatgtgtgtgagcatctcttctctgaaatacttgggactggaagggtttcagatttgagaggtttgggctaccaagatggctcagtgggtaaaggtgcttgctgcaaagccggatgacatgagttcagtccctggaccccatatgatggaaagagagaactgactgccaaaagttgtcctctgttctccacacacatgctggggcatgcacactctgctgtaaacacgcagacagacaaacacacacagacacagacagacagacagacagagagatggagagacagaggcagccagacagagacagacagagacagacagagacagacagagacagacagagacagacagagacagacagagacagacagagagacagacagagagacagacagagagacagagagagagacagagagagagacagagacagacagagacnnnnnnnnnnnnnnnnnnnnnnnnnnnnnnnnnnnnnnnnnnnnnnnnnnnnnnnnnnnnnnnnnnnnnnnnnnnnnnnnnnnnnnnnnnnnnnnnnnnnnnnnnnnnnnnnnnnnnnnnnnnnnnnnnnnnnnnnnnnnnnnnnnnnnnnnnnnnnnnnnnnnnnnnnnnnnnnnnnnnnnnnnnnnnnnnnnnnnnnnnnnnnnnnnnnnnnnnnnnnnnnnnnnnnnnnnnnnnnnnnnnnnnnnnnnnnnnnnnnnnnnnnnnnnnnnnnnnnnnnnnnnnnnnnnnnnnnnnnnnnnnnnnnnnnnnnnnnnnnnnnnnnnnnnnnnnnnnnnnnnnnnnnnnnnnnnnnnnnnnnnnnnnnnnnnnnnnnnnnnnnnnnnnnnnnnnnnnnnnnnnnnnnnnnnnnnnnnnnnnnnnnnnnnnnnnnnnnnnnnnnnnnnnnnnnnnnnnnnnnnnnnnnnnnnnnnnnnnnnnnnnnnnnnnnnnnnnnnnnnnnnnnnnnnnnnnnnnnnnnnnnnnnnnnnnnnnnnnnnnnnnnnnnnnnnnnnnnnnnnnnnnnnnnnnnnnnnnnnnnnnnnnnnnnnnnnnnnnnnnnnnnnnnnnnnnnnnnnnnnnnnnnnnnnnnnnnnnnnnnnnnnnnnnnnnnnnnnnnnnnnnnnnnnnnnnnnnnnnnnnnnnnnnnnnnnnnnnnnnnnnnnnnnnnnnnnnnnnnnnnnnnnnnnnnnnnnnnnnnnnnnnnnnnnnnnnnnnnnnnnnnnnnnnnnnnnnnnnnnnnnnnnnnnnnnnnnnnnnnnnnnnnnnnnnnnnnnnnnnnnnnnnnnnnnnnnnnnnnnnnnnnnnnnnnnnnnnnnnnnnnnnnnnnnnnnnnnnnnnnnnnnnnnnnnnnnnnnnnnnnnnnnnnnnnnnnnnnnnnnnnnnnnnnnnnnnnnnnnnnnnnnnnnnnnnnnnnnnnnnnnnnnnnnnnnnnnnnnnnnnnnnnnnnnnnnnnnnnnnnnnnnnnnnnnnnnnnnnnnnnnnnnnnnnnnnnnnnnnnnnnnnnnnnnnnnnnnnnnnnnnnnnnnnnnnnnnnnnnnnnnnnnnnnnnnnnnnnnnnnnnnnnnnnnnnnnnnnnnnnnnnnnnnnnnnnnnnnnnnnnnnnnnnnnnnnnnnnnnnnnnnnnnnnnnnnnnnnnnnnnnnnnnnnnnnnnnnnnnnnnnnnnnnnnnnnnnnnnnnnnnnnnnnnnnnnnnnnnnnnnnnnnnnnnnnnnnnnnnnnnnnnnnnnnnnnnnnnnnnnnnnnnnnnnnnnnnnnnnnnnnnnnnnnnnnnnnnnnnnnnnnnnnnnnnnnnnnnnnnnnnnnnnnnnnnnnnnnnnnnnnnnnnnnnnnnnnnnnnnnnnnnnnnnnnnnnnnnnnnnnnnnnnnnnnnnnnnnnnnnnnnnnnnnnnnnnnnnnnnnnnnnnnnnnnnnnnnnnnnnnnnnnnnnnnnnnnnnnnnnnnnnnnnnnnnnnnnnnnnnnnnnnnnnnnnnnnnnnnnnnnnnnnnnnnnnnnnnnnnnnnnnnnnnnnnnnnnnnnnnnnnnnnnnnnnnnnnnnnnnnnnnnnnnnnnnnnnnnnnnnnnnnnnnnnnnnnnnnnnnnnnnnnnnnnnnnnnnnnnnnnnnnnnnnnnnnnnnnnnnnnnnnnnnnnnnnnnnnnnnnnnnnnnnnnnnnnnnnnnnnnnnnnnnnnnnnnnnnnnnnnnnnnnnnnnnnnnnnnnnnnnnnnnnnnnnnnnnnnnnnnnnnnnnnnnnnnnnnnnnnnnnnnnnnnnnnnnnnnnnnnnnnnnnnnnnnnnnnnnnnnnnnnnnnnnnnnnnnnnnnnnnnnnnnnnnnnnnnnnnnnnnnnnnnnnnnnnnnnnnnnnnnnnnnnnnnnnnnnnnnnnnnnnnnnnnnnnnnnnnnnnnnnnnnnnnnnnnnnnnnnnnnnnnnnnnnnnnnnnnnnnnnnnnnnnnnnnnnnnnnnnnnnnnnnnnnnnnnnnnnnnnnnnnnnnnnnnnnnnnnnnnnnnnnnnnnnnnnnnnnnnnnnnnnnnnnnnnnnnnnnnnnnnnnnnnnnnnnnnnnnnnnnnnnnnnnnnnnnnnnnnnnnnnnnnnnnnnnnnnnnnnnnnnnnnnnnnnnnnnnnnnnnnnnnnnnnnnnnnnnnnnnnnnnnnnnnnnnnnnnnnnnnnnccaaaagttgtcctctgttctccacacacatgctggggcatgcacactctgctgtaaacacgcagacagacaaacacacacagacacagacagacagacagacagagagatggagagacagaggcagccagacagagacagacagagacagacagagacagacagagacagacagagacagacagagacagacagagacagacagagagacagacagagagacagacagagagacagagagagagacagagagagagacagagacagacagagacagacagacagacagagacagacagagacagacagagacagacagagacagacagagacagacagagacagacagagacagacagacacacagacagagacagacagacacacagacagagacagacagacacacagacagagacagacagacacagggatagagatagacaggcaggtagacagacagacgcagaggcagagcgaggcagagacagaggcagagggaggcagacagaggcagaggcagacagaggcagaggcaggcagaggcagaggcaggcagacagaggcagaggcagaggcaggcagacagaggcagaggcagaggcagaggcagaggcaggcagacagaggcagaggcaggcagacagaggcagaggcaggcagacagaggcagaggcaggcagacagaggcagaggcaggcaggcagaggcagaggcaggcaggcagaggcaggcaggcagacagaggcaggcaggcagacagacagacagataggaagagacagagacagagaaacagagcagttagagagacagccagagacagagacagccagagacagaggcagacagaggcagacagacagagagaggcaggcagacagagagaggcaggcagacagagagagagagagaggcaggcagacagacagaggcacaggcacagaggcagacagacagagacagaggcacaggcacagaggcagacagacagacagaggcagaggcacaagcacaggtagagacggaagcaggcagagacacaggcagacggacagtcgcagacagacagacacagacacagagagacggacagatgcagacacacagagacagagacacacagagacagacaggcacacagacacagactgacagacacagacccacagacccacagacacacacagacagacagacagacacacacacagacagacagacacactcacagacagacagacacactcacagacagacagacacacagagacagacagacacacagagacagacagacacacagagacagacagacacacagagacagacagacacacagacagacagacacacagagacagacagaaacacagagacagacacacacacaggcatacacacacacaggcatacacacacacaggcatacacacacacaggcatacacacacacaggcatacacagacacagacacacacagacacacagacccacacagacacacacagacacaaaaattttaaaaagatttgaggggttttggaggagaggaggaattttagaatagttgaataggttttgttgattgagtatcccttaatccatcagtggaattgagtgtaaaaactcttaagtgttccacattctaaaatgtttagaatgtgctgaaaagatgctttgattcctctcatcatccacccaatctttccttgataaccaatgtggtctctttaattgatgcattgaagcataccactctctcatcttcccagagcatgaaatacaaacaagcatgttcttgaaagccctctactgcttctcattggtgttcagctaaaacccaagctcgctggtacccctggtcccttaagatctggtgcccactcctctctacctctctgtgtcccattttccctcaccaccaagctccagccatgctgaccaccccagtgtctccttggagacactcctaactggaacttctccctttgggtcccttcatgtctgtccctttctgaccaggcagaaaaccgttccctccacagaaaggccacagctgtagggacacactatgtgaataccttgtttgtattttgtcctcagtagatttttactgacacacttaattacctcttacagccacaatatgaaatttgggaaccttgttgtgccacagtgcacggcacatagaaggcatgaatccagtgttgattgatccaataaatatcaacacagagacacacctcagtagaaagaggcagtgtgtgaggttgtgtgagtggcccaccagaactggtcagggcaggtattccctgtgttcctgtccttctcttgttcactgccgagctttccattgcttgtccaggcactgctgctgccccaggccgtccccagcagcttgcctgctgccctgcttgtgccctggagtcagtatgccctctgtctgagctgcattgtaaggtgccttaggcctgtgtgtagagcatgcttctcctactgagttctctgggaatggagccgtgaaaactgaggacttgtgtgcaccaggtgcagtgataagccacagctctctattctattacttaattcctctcactgcccaatgaataaggtctttccaccctcaccctgggagctgcatcccagcaggttacctggctttccagaccctgccagatgcaggcccccagggtctgctggcacctgcagagtgtgtgtgcttagaggaaccgaggatgcctggagcggggcagctgtgttgagagaagccaaagtcaggtggagctcgggagggactggtttatgaaatgaacagtcctttcctgttggtaacaatgggaagcagtgtctgtgcctttgggggtgcctggggcacctgtgggacatgtgctcagagaaactaaggcagtctagagcaggacagctgtgttgggagaggtgaaagtcagggtcaggtgggaatgagggagggtggtctattttataaacatattttagctgttaacattaaaaagcagcgagtgagagctggtatcttcaggggcctgcttggtaagagattgaagatcttgtgttcaggctcagtctgccgcccagctgtggttcctcctggccatggctcagtgtggatcacttagcctctctgaactctagttcctttagctataaactgtgcctgtctcagcacagttgagcaatgaacgtagtactgctgttgtggtttaagagtgaaaagccccaccctaggctcccaagtttgaagagttgatcaatctccagatggtggcgctgtttggagggttgtagaatctttaggttgtagaacctttaggaggctccagagatgctgtctatacatcctccgggtagtaaaactggggctttgctctgcaggtgttttaaacttactctcattacttgtggcgtggatatttaaattttaaaaagcatttaaaactttatgtggatgacaagtgtcttccctgaacatgtgtctttatatcacatgtatgcctgatgcctgtggaggccagaagagggcgtcagattccctggaactgaagttacagactgttgtgagccactttgtgggttctggaatttggaccctggtgatctgtaaaaacagtcagtactcatgactactgagccatccttccagccctccgtgttgtggaaagttgcttatgtgagattcacctttagtataactgtaggaaggacccagtgtcgatttcaaaccaaatgaagggagtcagctccccttcaggcaggtctgccctccagccacttccagtctttgattttgtgacaaggtcattctcaggaaccacaggccaagttacaaaagcaaaaacgaagcccctaagatgtcttaagtaagattactcatcgccgctgttcttagtcacatgtggactgtgcacacatcttacaagtgagtggagattatatttattgtatctccgtcttcctgaatttttgtaattgttcttgggaatgatgggtgctgtctagagttcctttcttctcacttacccgattccacagtctataaacacgaaagaaccttgtgggaggaagatatcccacaagaaatcctattacagtatcagtaatcactagctgtttgtcaggtggcccaaggtgccaggattgctggtcgcatggttgggcagagacagtgcatgatctagaaacagaccctaagcagtcatattccttgctggaggtatctggtatccattgcctggaggcatagaaaatcacttttcaggtagactgacagtctgggaggcatcagacatcctatagggccaccttggacagcacggacattccaacatcttcacagcagactgactgaaggacaaggcattggctaatccagtgtttcagagtcaagaagcctgaccaaaaaaagcggagtcagcaaagttcatatggactcagctgcctagtggtatgggaaaggctttgtccagagcttacagaggggacttgtgtgaggctgtagcagggggagggatccttctcagtatctgctcagagtagacaaattgtggaagacagggtgcttcaagtggaaactggcaggaaccacaacagggtggggctcagaagacagctaactcacccttcctctcttcattgtgtagctctgggctttcaaacaaatttaatttggtttggatagataaacactgggggcaactgttatcaagggtcactcaccacatggcctttatctctagaaatgcttaggtttgcaggcacctgtgtgcccagagactgatttttgcattaaaaccacttgacctaagaaaactttctgggattggttcccagaacttctgaataggatgtaggaggtgtggcctaagcctctactgctgctgctgcctcagggctacacctcaattccacaggggtagctgagtgtttaaagtgcttgtaatgtaaactatgaagttcaccattgctgcaactgttttattcataggcttgtcttgtctcttttaaacaggtattttgatgttggactacacaatttcttaatcaggtaagccagtgccttttgatcttatctttgactaaagagctaaactgttatggaaggatgcaaacagaaaaccatagagaatgatggcggttgagttacttgccaggaaaacattgctaacactatgtgtgtgtccacccaatcccacatgaataatgactcagatctgtttatatcaggagcgatagataaacgttgtcctagtttgctttatgctgctgtgataaaacaccatccaaaagcaaaggaaaggatttttttaagtttgcagttccaccatcaaaggaagagaagcaggaacctggaggcaggaactgaagcagagagtacagaggaacacgtcttactggcttggtcatttcttatatagcccaggctgacctgtcaagggatggtactgcccatagtaggctaagcacccctacctatagccatcagcaatcaagaagatgctctacagatgtgctcatgggatctgatgaatcttctcaagggtgacaaccaaaattatccaccacatttaccaagttcttacttccgaggatgaagccactggaaagacaaatagcaagtgggaaaatcgagctttactggctcagtagtccatttgatcagttctctcccattgagtttaatcttttaaaactgaatctatcacttgttttatagtcatggaaatatgacctaatgcattcctgagattctagacaggagtttgtaacccagtttactggtaagttttaccagcattgtattatgcaacacactaatttcacatagctatgaagttaaacaaattaaacagaagttaatagaccagaatattgacagtgcttataaaatggttatgattttgaaaatcagctttgtgaggctaaagcagtggctcagtggtttagggtacttgctgctcttgcagaggtcctgggtttgattcccagtccccccccccctcccccccccccccccccccccccccccggtagcacacaaccatctgtaactctaattccagaagatctagtgccctcttctggcctctctgggcaccaggcacaaacattgtttacataatacaggcatgcaggcaaaatatacatacaaaataaaaaagaaaactttcctatgttttctaaatttttcatagtgatcatcatttttttaaataatattaaaaaataattgagatgcctgtcaaaaacttaggagggaataatagtcgctgaggagtcactgtaaacgaaaggctgtgagggaagcaactatcactggctggtttttctttctgtaaacatcagctcatgtttatggatttgttaaattctagtcattgtggcttctgtgcatgtcatgtgatggttcagcttgtcccaaggcatgaccctcccccacttttaagatactgaaggaaaatgtcatctatgcagaacctcggctccaagctgcactggcaatgtcccaacgggggtcaagccttccttgccttcttctcaaaagcctcctcagaggctgcaccttggaatgtcttggttttcttcgagatggtaaacacagacgatagtgtatgaactttttgatacagcaagggtcagaaaaacatagcaggaaagataagaaaccatagacgcagcagagatggtacaagaattccacatgcaagcagatcagaaaaggctgcctgggaagatgcccaagaacagcagcctcctgcctcccgtgctgggcgtggaacccagggacttggaagagcagcccctcacctcctatgctgagggtggacaccagggtcttggaacagcagcctctcacctcccaggctgggcgtggacaccagggtcttggaacagcagcccctcacctcccatgctgagtgtggacaccagggacttggaacagcagcccctcacctcccatgctgggcgtggacaccagggtcttggaacagcagcccctcacctcccatgctgggcgtggaacctagggtcttggaactgcagctcctcacctcccaccctgggtgtggacaccaggaacttgctaggtaacacccactactgatccatacctgcagcctactgtggacttgaggttttggtactttgtagttccatgaaactgtttccacaaggtctatggtaaacacaagttggtcctgaatttccctggtaactttcttcaggggagaaggggtcaagccctaatcatttactaatatgcaagttgagaaacttgtgtggaatgaaccttcaccaagaatttatggagggagtgaacgaatgaatgaaatgagagaaggtcctttaggctgggagactgcttctgcagtcagttagcttggcattcgcctccttcaagcatgtgtctggatgctgtcctttaaaacaaacaaacccaactttgtcagcttgtggattgactgagtcattgtctgccttgaggtctcactctcatgtccttatccggactccagacatgtgggcagtggaggagacacaggcgtgggtctgttgtagctagtgctggatccatggttcaaggccttgtagaatggttgtagctagttattctggttagtgtgtgaaacaaacggagcttggggagggatgtttccctctgtcctgtgaatcctggagggttatgtcccctttactcaaaggcagcagagcaaataattcagattgcatatggttgggggggggggtgagtgacatctctacttgccagcaccccggtttctgtgagcatctgttttcatcctccaccccatactggcatcacccagcaaaggacttaaagaccccagagtctattcttgtctccccctcccagctcaggtccccctcccagctcaggagtgtcagggctggggagacagatttaactggttgcttggagcagagtggtcctctgtctcctgagttctgggaccagatgggctggtgctggcttcccacctttcttgttgtaagcttgggaggtcaagcacaagagaccaagtatgtttaaagttggacgcagtggtaagaaccagttcagtggcttgctaaagccaggctgcactcagaacagcagtgatgccttttcttttcttttttgtttttttgtttttgttttttgagacagggtttctctgtgtagccctggctgtcctggaactcactctgtagaccaggctggtctcgaactcagaaatccacctgcctctgcctcccaaatgcttggattaaaggcatgtgccaccatgcctggcacagtgatgctttttaagttctgctcttgaggaggaaagaaaaagcagctggtgtagagggtgggctaagtggattctgctgtttacccagcagaagatctaaatcactatttagatgctgagaaagctgtggtatcatagagcagtggtcagtggccctgttgcatgagtagtggtcggtgaccctggggcacagtagagaggagtgccattttcctgtacgtttatggacgtaagagaaagagggagggaaggagggagggaaagagggagagaaggagggagggagggaaggagaggggagagagagagagagaggaagagagagagagagagagagagagggagggagagagagagagagagatatcttatacttgaggagtcttttcaaggggaattatattcccacttgtaaaggaagatgtgtaaaaggggttggcaccatttcggtttctttttgttccaagaactatttattggctccagcaagcccctcaagtgttctctggcttgtcaggctggtgctgcttgcctgagattattcagctgtagctttgacgtggatggtggtaatgttgtcttctctggaatgatataggcctccccagagaacattctgtgatctcaaagctgaagaacgagcttccttgttggtgctagtgtggcaccgggctcaggcgggaatggacagtcacatgggaagtgtgagcattttcctctgggtgttttatgatgactgcgggatagcaatgagctccatcctcttttatcttacacaaaccagaggagaggcttttgggagtcagaacagccactcgacagagatcttcagaagacactggttggaattcttcatgtgtcactacaaaagaaaaagggaaaatgatcaatttggcaggaaaagattatagaatataatgtctttgtctcattatggacaatagactgtcatgtttaaatttagcttagtctagctttggcaagaaagtaaaaaagatttgtatttaaaaaaatttttagtttcacttttttctgattttttttgtttacatgcttataaatttaaaaccattaaaaactgtacttttctatttttaatactgtataaatttaacatcttaatctatttcaaatgtgtatttcaaatggctatatatatatgtatttttttttttttttggtttttcggtttttcggatttttgagacagggtttctctgtgtagctctggctgtcctggaactctctttgtagaccaggctggcctcaaactcagaaatcctcctgcctctgcctcccaagtgctgggattaaaggcgtgcgccaccaccacccagcttcaaatggctatcttcttttccttgatagcaaaatagtttttactataatttccacatttatttgaaatgacagtttagcatattcaagctattattttggtcatgaagaggatatcttgacatcttgttaggattcataagggtacaaagtgtgaattctaccttgagtgttactgagatgaatgggtgaaggctatgagcctccagggccactctaaagcttttgagaaagtttgtggagttgatataactcttagaaaattaattcctgtagtgatttttcttgtcaagttgccacaacctagaatcacttgacaacctccattgaggaactctctagatcaggtaggcttgtgggcatgtctagaggggattgacttaattgttaattgatgtaggaagatccagctcattgtgggcggcagcatcccttaggcaagggtttctgaattacatgagacaggagacagctagatgagtgatcaagcaggggtggttttactctctctctgttcttggctcagagaatgctctgtctaactgtttgagctcctgctttgacttctcagtgaaaaattctgacctggaattataagtcaaataagccccatcctgataaagtcaggatgttttatcacagtaactaacaaaactagaaagatttatctcatacatggacagattccacttatagcatagcgtttaatatagcacatattcgatcctgtacaagtgaaagcacttatacgaaaacacacctcacctttccaaatcatgatttgttctaatggagggaaggtagaccagatggctgttcacttctcattctatcttttctgctctagccttttcattgtgtatgtaatatctcagattgttgaaaggatggggactgtcattagcgtgttagataagcaatgtaacaaccctgcctttggatctcccttgctgacaccttatgcctgactggttcatgcctctgttcctcagcttaagagttgggttcaaaaaacaaaacaaaacaaaaactggggcttgaactttgagtctcagtgatgtgtgtggtttgctgtgtcatgaaagccacaaagtggctccatagacatgggtcttgttactttgcccaggctgaccttgagaccctggttcaagtatcctcttacctcagtctcctgagtagccaggactacaggtatatatcattgcaccttccaccccttttaaggtagatagtatcagttacaatgtgaactactgcaggccattttagtgtttatggtgttgatgaagatgtctgctcaccatcattgcaagtttgtcttcgattgtgtgatagccaaagtctctggaagagtctcccttgaatagttaagaagtcaggtggtcaagtgaaggattcattcaaggaaaaggactccccaagaagaaggaagagagccatcagggagctgtgctttgcccatattcagaggtcccttgagactcctttgggttaccagctggaaactgagaggaaggtttaatggaaaggtggaggttcattcctggggtaaggcccaggtggtcatgggaggaaaattgtctgtattaagtccaacagcttagaaacagcaaagcacatgtgaattttgagtccactgagaaagcccttgcatacatgtttctaaacacacatggaggtgaaagccattgcatatgtttctaaacacacacagaatgaaagccattgaatatgtatttctaaacacacatggagatgacagttccaacagaaacacttgcttagttactgaagattccatttcctttttactttgcaaatgtaacaccttttttagtgttaagtaaatgtttttttaatgatggtataaatcatgatcttattaaaacagtgttcctagctgagcctggtatctgtgtctttggagtcttgtggatcaggcaaaggggacaggtgcaaacactatgcattttataaaagggactcagcatctcctgattgtggcattttgaggagtggtcctcatctcactgcatctcactcatctcagtcctgcatctcactgaggatactcaagatgatgtatgcaaaccacttaacactgtgctccggagcagtgggacttgacaaaggctcactttgtctttaactgcatgagagtcactgggtgtaagtgtctctatcctgtccccctccagtctgtcctagatgctctttcctccctgcaacctttttccagggacctgcatgcactgattatgaaactttctgactccaggatcctcctgcctagagctctgctcctgaagccatgctgggctgggtagagtcccatgggggtcagtgtaaatacctaggtattaaaggccagctttgaccctacagggtaaactgaggtaggtagtgaggtatggcattggcaattggggtcagtgttgaaaacaggtgatggggagtcagcactcagaagagtttaccagggtatgtctagatagcagccagtgggggtgcacacatgcacacatgcatgcatgtacatgtagagtgattgaagtaaaagcagattccaacattttattttttaaccctttttatacctcttaggacaaagttttattacctcatagccacaagttacacatttttaagacacaatcaccacaaaaacatattctttaaaaacagattaaagtcattacatgaggaaattacagtaggactattgagcatgtatttcagttttgaaacttatatctaaccaaacaattcttacctatctttctctccacaagcttattgtaatcccaaagaaataattctgttgtcatacattaacaaagcttaagtaggccaagtctacagtagcaggtttctccctatgctggctgaggaccatctctacttactaaggaacaggtcacctgtcttatgttttattttgacgtcttgatcagctagactggctaatcatgtgctttctgttcttatactcataatacatgtctttattctttatttattacctttctatcccatggtgcacacagaaaacctgttaccacatttctagatcaccagaccaaggaactcaggcccagcccagaatgaatgctttccttgattgttaacttgtcctaagcctatttttcttgctactacaattacctgtttgtaatgcatataagtgtgcctgttatattctttccttcttactcttagttttgccagtctgtgaggaaggggcacattctattcttgattctaactttaagctatcaaataccctaacttcctaaaattattaaaataaagataactttctaaaattacttaaatcagggattccataaagtcattaattcatcgaaacagaatcatctcaagaactttcatcttcatgttgatctataggaactttgcccaattggtcaaccaggaagtaatcacaccaagctataggcagtgagtgtctcccagtgtccattcacattcaagccaaataaatgagtatggcaatcacaaacatgagaaggcacatcaacagcaatcctggggtgaactctctggggtcactccttttcagagagcactcatcttagttgaacaagatggtgggctgtctccagggagctcacttgtccactgtagtgcttcctgcacagtgcccaccacctgagtgacttttgtgctcagaaatatgtagaatccatgcttttaaattgtgtgtgtgtgtgtgtgtgtgtgtacatgtacacatgtcacatatcctcctagatagtgagtgaggtctaacttacttgtatattccccagtccccaaagtgcttttgagcaaagtgttgctagagggttttttaaaaaaaattgttttcacctttatgactactatatttagatttgttaattagaaaatgtggattaaaagtaacataaatggaaaggaactttttatactctgagtgttgacatccacagttccagcctccatatgcaattctacatgtagccattgctgaagatgtgtatctgttgataaattaaaaataatgccaggtatattaatggaaggacccaaaatatagggtcctttttaaatgcaaaagtgagggaagcttttagcaaatgggactgtaagatctctggttcctaaacaatgcagatggcttgtttcctgggtgttcatttgtggagtgttgtcttagcaccttttgaattgccttcctatgtctgaggctctttctgccttttgagggtcataatgtaaggcagaagccagacacattctgcttttctgcacaccacaggtcttagagctccagtcttgagatttagattctgagctgtcacgtgtggatggaggtgggacccagtttgcagcccaggaatggttggagtgacatccactttaagagatagaggtgttggtctggagcccagttttggtcctaaatgggcaccattgagtgctggtggggaaatttgggaacagttcctggctgcgttgcctcctggctgtctgtgaggtgcttttggagtttgcacaggctactggggtttccttaacgagtgccttttgtggtttaactggaatacacttctattatttatataaaaaatagataactaaggtagttatgtgatgttcatggcagacactctgctcagcagggggagcacgtgatcttccatgaggctttgcccatcagctgcatcgattccacacaccagaattaaaccaaattgcagctattttttgcatcagcacaagaaacttcctgtgagatgggaagggcatgaggtcgtgcacagaagcccagggctcggggccgcctgacatctctctgctgcagtgatttttgcttaagtcacttctgctggggactgaattttcttatttgtgaaatgagagaattcttccagataaactctaaggtcccttctgatctctggtgagtggttctggtgtgtctaatattagctcctgtccagatctgtgccagccgaaactctggctgttaatcccatgtggctatttaaattcaagttgattataattcagtgaagttaccacagtattgtgatagaatatggagtagatacttggtctcttctgctgcttcctcgcacagagctcttaaaacctttgtagatacccacaccaggaggatctttgctctgaggttttcctttgagctcagtccctacgcggattggccaagacctttgaaaccccctgagcaccaggagtaggactcagcttccaaatcccttagaatttccaagtaacagaagtgtctcgttctaatgaggcaaagtctaatagactcacagctagcctcgggatgggggacctgttgccaggggaaccagccatgagtgtagacggtttgatcttgtcacccccaagccaggcaggaggaaaactgaggatttagttgttcatggccgctgtgacactttccataaaagaccaaaggaaaaggcttttcatgttgaagacgatatgacctagcagtgtgagggggcacctggaaggttgagtattcagaaaaggctagcagttcccagcccctcctcccatgatttgtctaagaagcccttcccactatccacatagtgaacctgtaaacatatttaaggaccccccccccaactccctacttctgtgaaacatcttggaaagtgaactgagactcccacgggtattttgggattatccgtgtgtagctggttactcagaatcaataataaaacagccaatggcttgtgtgcagtctctgagactgcagaggtgtgggggctactctgtaggattgaacccagaacctgagctgtttgctccctccatgtggctagtttcagaattactcagtcgtagagagtcaattgcccagtgttgggggcagatctgtttcatagctgctcacagaaggatgctgagttggcggttcctctcttgataggacaaactcagcagctcagttgcaaaagccgcattttaagtgctcggtatccatagaagctactgctcatcctgttggacagtagataagaagcatgctctcagggtcgggtgacaaagtggggcctctgcttcccccagagagatgccgagcctctccttgtctccctgccattcagattgtgaacagccacttgagagtcacctggcttgcctcacacagacatcttcctaaatacacgaaccctgttcttacgcctctcaacaactatagctcaaggacacacaccaaagctggaatgtgggattattctagaattttctttctattttatatagtttcttttcttgttgctgcagccaagcccttgacaaaagcaacataagaaacaaagcgtatcttggctgctcacagtctgaggaggtacagtctaccctggcagggggagtctcagctgcaggagctccaggcagctgtcacaggtccatacactgcatctgcagtcaggaagtgaagagagatggcagctggtgctcagctccctttctccttactcagcccaagacccccagtctgtggcatggtgctgcccacagtgaggaggttactgccacctcagtaaacctaatctattagtcacgccccaaagtttgtctcctgaggtgattctaccgcccatcaaagtgacagccagtgttaaccctcacagagtcctgacctatcttatctgtcatgactcccactaaatgttactgtatctgcccccttttcttcatcctgttggtaacacctgacagggcctctttactctcttactggccctccagtgtgaatctcgctcacctgtaattcctttgttccagggcgttccttcagtccctgctaggagtgttgactcaaatacaatttaaaagcagacacaaaggtggtctaattagcaccttgccttcacatcatattggcagctgccctatgcaggtataactagtacctctccccccagctatctcagatggggcctctgttctataacaaacagtcctcgtgtctggttccttattgcttctggttcccactttgtcaggtgcacgtaaaggcctgactgtctgtgtcacaggacacctgactaagggatggagctggggttggggcaggcctttggggaaggttcacaaggtctttcggggtgattggtgtaagtatatttaaaccccacggtgggaagagcactatacattcaacctcatcaaagagatatcttctatccagaagagtttttgaggtccatgagagtgtcccaggggcctgactttgacccaggaatgaagagacataaagcttttgatgtagcaggcatgggggtttaggggtctgcaatgggagtccaggtgctcatgggagctttgcccagaattgggtctgccaaagccatctggcagaataattatctcacagcccagctgctgctcatccagatgttgtgtgagctcatgctctttaccccaccctccccctttctgcttatgttgtccagagtcgatgctgttgcctttaactaaaagctcctgattaatgcgtgaccgtaagcatgcacaccaggtagcagagtactttactctgctctcctaatagctcagtgttgaaggggcacatggtctctcttatactgtaagacagacaaacttgggaaaactccagctatgtaaaattcgtgctaactacagggcagtctttataacagagatgggcagatcattcacccatgcagctttatccagagcacaaggaaaagaaccaattctcataatagtgtgagcatagttgaaaagttatggcaagttcctaggaaataattattttaagttctagcatttgtctttattggtgcaggtaatctgacaaaagggaagtagggggagagagggacagctgagttctcaagatggaaaagggggaaagcactcgcaatactttgtctgagctggagtggtgactagcaggaactgcagggccacctctatgtaaacactaggggccatgtagccgcaaaaggaggacctaatggaagactgcctagagaccaaggattgctgatgcagacaatgccagccaaccaggaggagctgctgtttagaagagatgctttcttgggaccaatgggtcacaggcagagggtattaaaggagattgcagcagaggagcttgccacgggcttttcttacctgctctaggagtctgtgttgttgactctgtgccacctccaatccccaagggcaggtagggtcaggcagcaggtgaccacagtgcatggatcctacagtgcatggttcctttttctgtgttgttttcgcactggggtctaggagggcagtgctctcacactggggtctgtgaagatggtgctcatactgggatctgggagatgtgactcccttgactgtgactcttgtgcttctaagactagtatgtacctctagtgggcccacagacaataggcaatggatttccgtcatctagcacactccaggactaaaacttcagcatcagaggctttgatggaacaatgtgttaatatttcagagaagcaaatatgggcgctaaacttcccctttccaaattttacatgaactaggacagttaaatagggtctgtcatcctagaatatttgtgttcaaaagtatttgttaaaacaaagaagtggaggctcggtagccttaacatgcagacaggtcaccattgtagattgaaggtttgtagctgggctaatgtttacccttttcctctggtatcatggtgactccatttagatttctttcatatgtatatgaaagaaagctctggccaggggttatcccactccccctgccctttggattggccttgctcagtggttcctttgatagtgctccagtttcctaactgctggggttacatgtgtgtaccaccatgctgataatagaaaaatgtgaggaaatacatgaatacctagaatggttccctaagttggcttctgtttatgatctccatcagtcagcagtgccacctgcttctcagagaggagctctatccacaggctctgaatttcagccatgtttggcacatttaaggactgtgagctgtgtcctgtggacttcatctcccactcagtgcagagaccagtcagtgacaggggcaggtggtctctatggaaaggacagagcagactttacacagcaagcaagcagcttacacagcaagcagggctcctacaatgctctcaataggatcccaagggaaggtcaaacctacaaaatgaagccacaagggaaagaaagagcaattaaccctatggatggcttcacttgtgaccgggccattggaaatggaaacacttagaacctggggccctggcatctgtttctaattgagaggttacttgcagtcagtctgtttcatagagttcagtttgtatgtgtttatgaataccgagcctttttgcagtgaaatccattttggaaattaaaatgggtaattatttctgaaccttttaatcatttttaagcaaaataatgagctggaaagcatttagctgaggaagctcatctgattacacaggcaatgattctgtgggaacaagatgcaagcatatattatctccctttgctctaggatgccaggggtgggggtgagggctcaacctaactcctctaggtcccgtggtattatgttttttacctaatgttcacaggcctgagcatctactcttggttttctatgcctttcttgttcttggacatgttacttcctgtttctagtcttttgtgtctcattggtaaagtgttttatgatttataaagcctcttttagctctgactctgcaactgtaggattcttgcaacttgactcaagtggacaagttctctctcattagcagctgagcaacctagaaccatgatccactccaggtccctggacagaatggtaggggcttctagagtattccatacaatagctaaagaagaaaacaagcattcatggcctaactagaaagataagccagttagacaggcctttgtccaggccttctgtagcagttgttaagtgcacagggaagagagtagccttcagacagtatgagcagataacttaaggatgatgtctttcttaaccaactaatgggacttctggtccacttttgtttttgagccaaaactctaggatgtttattttcttgccaacattatcattcttactttttaatccaggtcgttgagtcacatcttcctgtctaacaggccgtgacttccagggtgatgacactttgttaagttaaatatcttcagaaacaccagcactgagaggcgacgtggacacaaagacccatctctaaccaagtggttatttgcagtagatatgtgctgggaatgtggcacccagttttctccagtgggtgttattgggcacagccacactccagggcaggcctcatgcccaggagcaggtggacaacacaacaaaacattccatgattttctcttcactttggtaatttttgtcttattaaatttcttctttttagattctttttagattatctgttttgtttttttgactttttttctttatctggagggagagaatatgaagctggtggggaggagctgagagttgttgggagatggcaaagaatatgaccaaatgtattgtctgaaaaaattttaaatactaatttaaaaagaagtctctactaaagtgacccactacagagcaatccttgacacctaagaagctggaactaagagctggacctagtaaacttggggacttcaaggagagatagaagccgtcaatgagggtgctagagtctcacttcttggccctcccagggttcccagaatgcatttcagcatgaccaggaacaggggttggacgaggcagaggtaaatgactttgagaagctgttttgttttgttttgttttgttttgttttgttttgttttctggggctctgtggctttagcagtcatgtgcccctggccagtttaggtggtaatttagggaaggttatactaaggaagcaggcatgtccagaaacactccatccccaggcaccgcccctggcatttggagcatatatgttcagaattgagagttcttcttggtagattttcctttgatgagtatgaagtgtccttccttatcctttttgataacttttggttggaagttgattttatttgatattagaatggctactccagcttgtttcttgggaccatttgcttggagaattgttttccagccttttactctgaggtagtatccgcctttgttactgaggtgggtttcctgcatgcagcaaaatgctgggtccttttacatatccagtttgttagtgtatgtcttttttgggggaattgaatccactgatgttaagagatattaaggaatagtgattgttgcttcctgttatttttgttgttagaggtggaataatctttgtgtggctatcttcttttgggtttgttgaaagattactttcttgctttctctaggatgtattttcccttcttatgttggcatttttcatttattatcctttgtaggtctggatttgtggaaagatattgtgtaaacttgtttttgtcatggaatatcttggtttctccagctataataattgagagttttgctgggtatagtagcctaggctggtatttgtgctctcttagggtctgtataacatctgcccaggatcttctagttttcatagtctctgttgagaagtctggtgtaattctgataggtctgcctttatatgttacttgacctttttaccttactgcttttaatattctttctttgttttgtgcatttggtgttttgactattatgtgatgggaggaatttcttttctgatccaatctatttggagttctgtaggcttcttgtatgtttataggcatctcttactttaggttagggacattttcttctataattttgctaaagatatttactggccctttaagttgggaatcttgtttctcttctatacctattatctttaggtttggtcttctcattgtgtcttggatttcctggatgttttgggttaggggccttttgaattttgcattttctttgactgttgtgtcaatgttttctatgttatcttctgcacctgagattctttcttctatctcttgtattctgttggtgatgcttgaatctgtgagtcctgatctcttttctaggttttctatctccagggttgtctccctttatgatttctttagtgtctatttctgtttttagatcctggattggtttgttcaattccttcacctgtttggttgtgttttcctgtgattctttaagggatttatatgtttcctctttaagggcttctagttgtttacctttgttctcctgtatttctttaaggagttaattatgtcctccttatagtcctctatcatcatcatgagatgtgattttaaatcagagtcttgctcttctggtgtgctggggtatcctgggctcactgtggtgggagaatggggatctgatgatgccaagtagtcttggtttttgttgcttatattcttgcccttgcctctggccatctggttatctctggtgttagctggtcttgctgtctctaactgtggcttgtccttcctggaagcctgggggactagttctctctggggggaatttgggtatggagaactgtggtacagggtcaactccggggtgcggacagaaactggatggatcctatctatccctggctgttccttggttcctgtgtcctgatggctctgggcaggtccctcttgggccaggaatttgagcagaagtagtggtcttacctgtgctcacaggtatgtcatcctgggagagcagctttctcccgatggtatttgggtgtggagcactgtagaaccatcattgttttaaactgtgcttctctgagagggtactgtagtcctgccaatgaaattaattgaatcagaggtttggggcttctcataaccgtggctttttgtaggaaggaaataaagaagttgataatttcgttttactaaattttgttaaactgatgagaaatcaatcatgactcttttaaaaaaaatgaaataaagagaaagataaaaagacatagcttaaataactctgaccacacaaccacttagcatggtatctccatggagaaatatgctttgattcccacaaccctgtgggaggtagaccagagggtggggagcctgggggtggggaggggtttggggtgagtgaggagtgtggagctgccatggagtggagaacatgctgagcaggtgctggcaggctgctggctctcccctagtggtggctctccatgctggttactctggtgttttacatggcactgctgagcaggctgctgtggtctctggtgggaccagactccatcctggcttttctggctcctgtggagcctaatagttttccctgggtttcctgctgtgtcactgtacacagttggcttgtgcaccctagtgatatttaactttggctgcctgcttgtccacccacagagactcttcagcctgggttagtctctctgtttcccgccggtgggaaaaccagtctcctgcttttcgtggaattactcagttatgatgaggtgccagggaggggaaatgggtgtttttgtctgtgagtatggtggctgctgtgtaccttactccagaggagtacctctttctatccaggccagaacaacatgcctggttcaggctctagccatggtctgctaaatgggagatagtgcctgggtcataaggtcttttgaggccaaggtcagaagatcactttgtaagtagtctcagaagtgcgttcctagtgcattagtgaattcctgtgtgtaacactgtgggccagagcctgggaaatatggtggcccttctttctgctttctgaggcagaaaaaattctgccctgttttctggggtgtaagagaaccatgtagctatcttacttaaattgaaagcttgttggtagttttctagatactagctggagctgctggggctggagagaaaaatggaaaagcatgaatggcaggcaattctatccacaggtcaaaagtcagtctgtctatctatctgtcagtcagtctgtctctatctctttatgtctctgttttatgtttgtggtatatatgtagtatggtgtgtatggttgtatgtggggtgatgtgtatggggttgtgtgtttgtgtgtatggtgtggttgtgtggtttgtgtatgtgtggtatatatgtaatgtagtgtgtttgtatgtgcatgtatgtgtactatggtatgtgtgtacataatacagtgtatgtggttgtatatgaagagtagtgtgtgtgtgtgtgtgtgtgtgtgtgtagtgtaaggtatgtgtccctcctgccttatactgactgtatctgcatgaaaaaaatgcagcaaagtttcagttcagaatctgggggtgtgagagaatccctgggagttgcataacagcagacagacaggaataacatgccaagccaacagcaggaatcatgggaacacacacagagagccgaagccatagcatgaccctgagctctgaattacaatctgaagcagcctggggtgctgcaatctaaccatggccttactcagcttcctctctggggatagggtcataggcatgggcttgtcaggccgctttactgggtgctgctggctacccacatgccagtgaccaagtaatatagccaccttaatgtggggaaacctttctaatgatgggaggaggatttagagttttataagctccttggcacccagcatgcctgtaaagtctgtgaatgcctaaaggtgtgttctgtagtgcttgtatccatttttgtaccccacccacccagcccagacctctggacttctgtcattttctgagctgttttctacaactgttttcactgtactgagttttacaggcctttaaaatggtcatttttttttttcatagactatggtacttctgtccaacttcccagtaggcagtcagctgctggtttgtatgcagggggacagccaggcacactgggctcagcaccaccttgctctctctgctctctgctctctctcttcctctctccccctccccctccccctgtctttatgtgtgtgtgtgtgtatggcttcaagcatctccccgatgctcattgaattcttccttcctgtgctgtgctgtccatttgctctggggctggagacccccagagagggaaccatcccttctcattccagctggagattttctatatctgaattaatagcaagttcatgtacctggtaattgagagactagcagcgatacctgccaaacagttgccctacgagaggccatttaaactagatgttcactgtgaagtggaatctctcagcttcgtcactgccgacattttgaacagattacctccttatgtgagaggttgtctatgatggttagcttcaagcatcaacggatacagcccagagtcacctgagaagaaggtcctttaaaaaagcacaatgttttcactttctaagaatttcatacttgcacaaaatatattttggtcatagtcctcttcactactaattcctcccaggggcactctgagttcatgagtgcagtggtctgtcctgtccaaagacactgtactgcctgagtcctgccagacttctgggccttacaatctctcccctccctcttctgcagtgattcttgagtcttggtggcaggatgtgttatacagggtgtccatttgtcactgagcaccccatgaacacttgttttctgcacttagagtttctgttttaacccccatgcaccaggcctgaagttcatgtgtttccttctgtggagtggtgttttaaataacagcagttggtaactcctataacctctatgttgctgctgtaccaatggacataatgagtcttgtgcagtgaaggtgtttgcatatgtgaatctgcagaaggattttttttctggaaatccttggggtgcctgctctggctgagcccttttcttagagaattatcttggttataaggaccagtggggtgaggctttcagccacatgacaacctcagctccacattgccacatccagctctattgacaaatctagacacagatatcactcatgtaactctgatttaagatctgccaaatgagagggtcctggaagctagattcatcaagaattttggaatcaagaggatgccatgtttggtagtgagacaggagaaaggtagccacaggaactgtaagttgaatggaacacaaactattattctgggagagccaggaactgagaggaaacaaaagagcttatcacagagagaagaaagtgctggggccagagatggagcagagcggtgtctcagtctttgaattctgtccatttcccttaaggtaaatcctcccagatgtgagcaggcatctgtccctaccagtggaggaaagtattttgtgtaaggtgcttcttagatcacactggacttgggaaatatggcactgtgcagcctgtaactggaaaattgttggagtgaaataaaaactataaacctgattgtgggaacattggctctctccatgggactctcatttgtcactgactggtcagctagagactgtcatgtcgacttagctgttctaataacacagacactcacagaggcgtctggagaaaactgagtagtgaagaccgttgccagggatcattagtcctaatttaagcaataatcctgtaatcataaaagatgttctggagcagtctctcccaggtagcatttatcattagaattataattgcagtttagtctaacaacaaatgttgaaggctgtgaacatttggaccctgttgccaagggagataatggggttatgcctaattgccagtgtggtttttctttcgtgggacaagtagctggcgtttttctcacacatacttgtgcacttaagcacacactttgtatattgcatagatatgcatgctctgtatgtttgtttcggaagtaatacttttaataaaaataaactttatttaaaatgatcagagatgatctgagtgacttttctaagctactgaaaactaagcagtgagccagtgtgggtgctaactaagaatccagcaaatggaaggtactaagcacttagcaattgtagcaagtttagatactaagaactgaggcactaagaacctagcaagcttaggcactaactacctagcaagcttaggtgctgactaagaacctggtgggtttaggtatttaactgtgcttagacaggctttctctcctcagttcttccatcgagtccagtgaagaaagcatgagtgttttataaacgagaaactgttgacttttcagacttgacaaggcctcacaggtacaggggggcatgtctggggactcaactccaaggtccagatctctccaatgggatctctcttccccacctactgcctcttttgagtaagtctcagagtgcagtgtggtggtatcagtaaagttgtccagcagtggcataataaggtactgggggatgagccatgctagggagaactctgggagtttcctgagacgagtaatggcccagctgaatcagcagtatgtgacttggagcaaatcttatctcctacttaagcttcagtttgtctgtctataaaacaagtgatggaggccacttgccctcgcttcatctaagcacatgagtctgagggaaacagatttgtttcttgtttataccaggggtctgcctgggaaggaaaaaccaatatgtagagttctgaagtgtaatgcagcccaaaagggcattctgtggcaggcctaggaagcgggctatgcctcacacagcatggcttgaaccatggcttgcaaacagggttacctaacaatctggtctgtttgtgagaacgtctgtgtggcaagcacgtcatggctgagctgtcttttcagttccgaggcgacaattcttgaggtgatccatgagacttccttgcccctccctggcttcttctgccaattgggccctgtgcacccctactctgcatccaagcttaggacttctcttatgcttctttgaacacatgccgcttctctgaacataagctgtcccatgtgcacagcccattgtctcttgtttatttaatatattttgccttcagaggctcagcatggtctttctcaggagggcctttctcagcctgtaaagtcacatgctctgctctggttaccttcctccagatagtatggtcttctgggcctcattgtggcttcccagtctttgtgaaatggcgctgttgattttatttcttattgaactggaagctctgtgtagcacaggctgtatgtgcttttctttgcaagatgagcactgcgcctgaccctccaatggaccctcctgatgtttgtctgagggtatgaggatgctatattctcaccaaactcctttccttctccttctgactcagactagctgcctcatcttaagattgaacagttcctacccaccctaatttctcaaacattcgactgacagattaagctgccttcttcccatgtagagcactagggaacaccccggaacttgacatagatggtcaaggcttaccaggatgtgatgtgggtgttaagggatgtggataaaatgacagacaacacatagaagcaagattaccaaggcagcatgagaaagccaggcagcatgtcaagtgaggtgatgagtgtagatgccgacaccaatcactgatgtccccaagcctgtggctaagagagaatttgttgctgggaggtcacatcaggcacagaggtctagaaatggagagatgtgtgtgggtttagggaaacaaggtctaatgtaaacatgtaaagccatgtggtgagaggacaggccagatgagaggatccctagggaccaggtaggggaccaaggcttgttccattcacagtgaggggcatctgtttggcttcacatacaggatgaactgagtctagttttctattaaaaacattaactctgcattggtgcagaagtatatgcggcttgaatggtacatatagatacatggagttgtgggatagtatctacatgaaagggagactaggagaatgggaccacccaacagccaccctgaaagtccaggttcctagacttgacagtgaggcctcagggggtgaggaagaagggggaggagagcccaggtggcttttcttggtagcatgataggaccatgctgcttgcagctgaggccaccggggacccttccacatggtgacagatggcttactaaccagaggtcctcagagtgggtcagaatgtaacagacacaattaaatttcatagtcctctgctatttactattgttgttgacaggaacaactcaaaggagaaggaagggtttgctctggctcatggtctgagaggattcagcccaacacagtaggagcctggattctagctgtgggagctggttacatcccacaaggtggaagttaggaagtaggaagcaaaggggtcatgatatgacctttaaagcccacccctggagcccactcaccatacccaagcacgtactaaatcttggaggtggcgtatctcaagtgcgtgaaaagttcattagattggcttccaagcatcaggtgtcaccagcagctcaaatatgagatatttatccaggcttagagtagataattatatggcaaggtggtgtttgcatgaaactgagcctcagattgttctagaaaagatactgaggagatcattgggggggggggtgttgggctctcgtctcatgcttgtctgagagcatcgggtcttctggagtctcctctgtcttcaaagtgtttccattctgtcctctgccccaatgcatgggcaccaagcagaaggaaactgggggaaatgcccaagaacacttgagaaagggctggctcacccagggcaagcaagcagctgttaacttcagtctgattttgccctagaagttatgtgttgggcagacagggggagtgcttcaggggagctggggtgtggtgagaaggatacatccaatgaatgaatgaatgaacgagtgagtgagtgagtgagtgagtgagtgagtgaagggcaaccaggacccaagccagggatctggagaaggaacttggggccatggtcagtttagtgaggcagatacagaaggtgggggatgggcacccagctgagccttgataactcctggcatatgcaagctctgattctttttggtgttttgggggatcaggtattagccaaatgcaggtaggtactctggtcaagatgacattagtttggtgtctggccagcatttctgggtggtagagggcattgtgggacagtgggtaaaaacatgggcacaggggaggctgaggggtcaagaactctgggagggaggggttgggagggagagcaacatttgggatataaataaagcaagcaagcaaacaaacaagcaagcaaaaatcaaaaacaacaacaaaaacccatgggcatgaactagactcctagatttcttatctgtcacttactaacctgtgcaggtcacttatgtctttgtgtctcaggttgttcatctgccaacagcaggtgaactgtaacagggactgtaatgtcactgtgaggactcagtagcttctgcatgaaaggctgatgcttctgttccctgtccctggagtgggatgagggaggagaggtcagacattgtctctgtccaaactgagctgaggcttctagaataaataatgaggtctcttgggatgtcagctgtacgtgaaggaggcagagagtggtcctgggtggacatattagtcacttttctcattctgtgacaaaaatccctgaaaagtactgtactggctggttttgtgtgtcaacttgacacaggctggaattatcacagagaaaggagcttcagttggggaagtgcctccatgagatccagttgtggggcattttctcaattagtgatcaagttggggagggcccattgtgagtggtgccatccctgggctggtagtcttgggttctataatagagctgagcaagctaggggaagcaagccagtaaggaacatccctccatggcctctgcatcagctcctgcttcctgacctgcttgagttccagtcctgactttctttagtgatgaacagcggtttggaggtgtaagctgaataaaccctttcctccccaacttgcttcttggtcatgatgtttgcgcaggaatagaaaccctgactgagacaggtaccttaagggcagaagggtttattgtggctcacagttgagggggatacagtccatcatggagggcaaggcacagcagcaggagaatgaggcagctgcacagcttgcatctgctattggcagagaacaggaagtagagccaggctatacaacctcaaaggctgcctgtagtaacccatttcctccatcaaagccccacctctgaaaggttcaacaaccttcccaaccagcaccagctgacgaccaagtattcaaacacaggagcctgtgggggcagctgacattcaatacagtagagggttgtattcagagtctgtggtcccctaggattcacaggcatctggcagagcttcctgaactcccaaaacaagaggaagaatgtgagaagggttaggacttacagtgtttggacatattagccctcattccccttcctgccccacccccatagagtgagctgaatagaatatgccctggccactttatgaccctgtcataggataaaaaccaaaaatactgtttgaaaagattgagatccataaatggattaaattatttttattgtaaatttcaattattttattaataataatcaattattaataatattaaacctaccttcttagaaatgcagtgctgttccaacgcacgtgcaccaagggctcataggaccacaggaaaggacgtttttgtccatgttgagtccacctgcaagttttgtgcacttgacaaacatgtttactcccctactccttccagcccagcttatgtctttgctccttcctaaagcacaagcagatccttttatctgaaatctctcagctacctgctgagccattcttcagccagtttctaagtacagtgtaaagaacttgaggctaagagcggtggctagttaatactcgggcatctaatgatacaggaggaaatgaaactcatgaagctcatgaagttggaaaagcactttgtagctggtgattggtctgtgcatcggctgtgaattggctctgccgtttacccagtgtgtgttgctgggtgtgttactccagctttctgaacctccattctcagcaatgaagtggcgatatggatgccaacttaaaactgtggtacatcctacatgctctaaggagtgtgccaaggagtgactaaagtctagttgggcaagaactttcaaagaaggctagggagatgttcagccagcaaaatgtttgccatacaagcctcaaaacctgagtttggatcctttaattccatgacaattaaaaatactgggtatggtggagacaggtagagccttgcagttcactgaacagccagccctgtccagccctttctagcctaggccagtaagtgcagtccaggccagtgagagaccttgtctcaaaaaccaatgtggttggtatcttaacctcaggttgacctctgctttccacatgtatatacacatatataaatgtagacacatatacacacaaacatacacgattgtgatagtttaagaatggcacccatatccttatatacttgaatacttggttcccagttggtggaactatttaggaaggattagaaggtgtggccttgttggattaagttgtctctggaggctggctttgaggtttcagtactgtcacaactccccaattgattgtcacatgtgcctgtgaatcaggatgtaagctctcaactactgttctagcaccatgcctgcctacctctatgaagctccctgctatgatggacacagaatctaaacctctggaatcatgagcccaatataaaatgcctttacaaattagttgccttggtgtcttagttagggttttattgctgtgaataggcaccatgaccatggaaacttacaaagtttcagaggttcagttcattatcatcacggtgtgaaacgtggcagcatgcaggcagacatggcgctggaaaagaagctgagagttctacatcttgatccacaggcagcagaatgagactgtgtggtatatcaggcatagctttagtataggagattttaaagcccacccccacagtgacacactttctccaataagaccacacctactctaacaaggccatacctcctaatagtgccacttcctatgagtcaagcatttaaacactgagtctttgggggccatacctattcaaagcaccacattccactccctagcccccaatggcttgtagccacatcataatgcagaaatgcattcagtccaatttccaaaatctttacagtctatatcagtctcaaacttctttaaaagtctaaagtcttttctgagattcatataatctcttaactgtaatctcttataaaatcaaaataaaaaagcagatcacatacttccgatatacagtgccaacaggatacacattcccattccaaaacatagggatgggagcactgtcaggaaacactggaccaaagcaagactggaaatcagctgggcaacctccaaactttgcatctccatgtctgatgtcacagggcttttcagatctcttaatcctttcagctttttgttgttttgttttatttttgcttatggctttagtttttctgaacagggtttctctgcagagccttggctgtcctagaactagctgtgtagaccaggctggctttgaactcagagattcagttgtttctgcctcccaaacgctgggattaaaggcatgtgctctcgagcgcgcccccaactcgccagcaagaacgatgccacagcaggatccttctgcacacgtttattcagtcctgtttcttctttctttatatctcccgataacaataatcccctcacgaataataatcctctcacgaataataatcctcccttgaataataatcccctctcgaacctaggcctctcacttttatatactctcagccctcatccactcacagcaggccacgtcacttcaccaggcacgcagcttcagctaatcagggcagcaggggcatatctccatcaaaatggattcacctgtatcctggtacacctgcgcagcactcaagatgtttgtgtcttatatgaggaagtcaggtgaaagtcatatgacttagctgcagtctctagcacctttgggactgccgccacacccgctccccacaattcccccttttttcttttttggcagagagaatgtctgtagatagccccccgcagccatgccccttacccgtctttgggtgacaaacagcattggtttgatccctgtcttaggttggtgacatgcccagggagtcttatcactgactacctctctatcatgccaagccacacctggggagattgtgttttgcttgtggcaggtgcatcaaaaggccaggatgttgattaatctatggccagatcttaattgctgcaagcaagcctcatgggtgaaggtagaggtctgatccccagtgtgcaagcataggggccctacacaaaaccatcccttaggctcatcacccagaaaggtcttggccagctcccgtgtcatttttcctgagggaagggaactaggacactgaaccttcatgcaatcagacatgccttccacaggatgccaacagcaagctatcctctgtgcagtgcttagcctcgcaccccacggcataacgcagcatagtttcttttagagcggcaaaccgaatctgaggagattgccccgcctccactgcagcaaaagcctacgctaccatggcgaaagtgcgggccgcacactctgcacctaagacatgtgccaaacacaaaaaacacacacactataacaagcatacatcccagggctctcatccccactcatcttccctgaagcaagggatagatagccagaggggctatctctttaaggggaattcagggatcaaaaaggcatggaaaaatttgaacgtcatgtcgagctggtatcggcttctggaataccgaaaggatctctcatctcggctccatcctttgtgcttgtgggatcatccaccacatccacaggggcaactggatcaggagcctcattcttgcagcgtctcaccaatctctccagcacccaaagaggttccgtctggtcctgtggaaacacacaaacagaccctctcgcccacgtcaacacctgatctactcgatcctcaggggggatggacacaatacctcgtggtgatgagaccataacctcaatcacctgtgtgtccatctggggagtcaatatgagagtcaagttttcactaacttcccctctgttaggcaatgatttccacgcccttataggaatctgattcacctgctcaaacacctgcagtggatatcctgtttgttgttgtgcaaatcgaccttgatcaagcagcatatctctatcccatgcaaatttagcttgatcagtgaaaataggacatcccagcaaggagaatctaacctctctccaaatctccggacagaaggtccgtctatatgcggctgctgaggaggcatagggaggaggcgcagaagctaattcgccttcctcttccacctcggctcttttattttgtcctttctgtccacctgataacactgtgtctcctttctttttcctttttctttttaagcccttctcctcttccgacatactttcttgttgctctgtaaggattttctgacctgtcttgactgcctcttgattcaaacagtaacagagtccatatatcagaacaaacaagaccaaaactatcagacctacccacaaagggtcaatgggagaaaaaagcataactactcagcgaggatctattgatcactacactgaggttatcatagttccttaacttgtccccaaaccgggaaccttaacttgtcccaaagccgggaacctttccttaccttgtgcctgcttcctggcaactttatgctcgcctctattttatccgaggtccttcccaaactcctgggttactttgtgcctacttcctggcaactttatgctcacctctattttatccgaggtccttcctaaactcctggggtcgcaagtttcactcaccgtgaacttaccctgccggcaaccactgactgctgaaagttctgaacttggtgggggagtcggttccccgtacaggccaccaattgtcgcacctgctctcgaccagcaagaacgatgcgaccactagtccttctaacagcagtttattcagtcttcatctctcttctttctcttcatcagtaccgttccccagctgaagagttctgaatccacgccggatccttctcaacagtctgttttacgggaacactttattaccatgacccgcagttctggttccggaatgagggatcttccttgcgccggtgatggtaaccgtcctgggttttctcgtcctaggtcttctcgtcccaggtcttctcgtcccgggtctcagcaccaactcttacccgcgttcacgcgaccggccaggaaagacgcaacaaaccggaatcttctgcggcaaaagctttattgcttacatcttcaggagcaagagagcaagagcgcaagagagcaagagagcaagaaaaagaacaagaacaagaaagcaagagaaagaacaagaaagcaagagagagaaaaagaacaagaacaagaaaagcaagagagcaagaatgagaaaaagcaagagcaagagagagaaaaagaacttgttgcgcgcccccaactcgccagcaagaacgatgccacagcaggatccttctgcacacgtttattcagtcctgtttcttctttctttatatctcccgataacaataatcccctcacgaataataatcctctcacgaataataatcctcccttgaataataatcccctctcgaacctaggcctctcactcttatatactctcagccctcatccactcacagcaggccacgtcacttcaccaggcacgcagcttcagctaatcagggcagcaggggcatatctccatcaaaatggattcacctgtatcctggtacacctgcgcagcactcaagatgtttgtgtcttatatgaggaagtcaggtgaaagtcatatgacttagctgcagtctctagcacctttgggactgccgccacacccgctccccacaatgtgccaccactgccccacattctcccagttttattgactgcaacacacttttctctctcttgggctagctccactttctgttagcagctctcctggaaaggtataccaggcctctagcatttccaacatcttggcgtctccaacttaatccagtcttcatcttcagagctttacacaatggcctctccagacctccatgcagggacaccctgatgtaatctggtctcagcagctttccttagccacaaagggagattctgttatccctttcttgtatccttgccccgaaagccagaatcacgtggctgaagctgccaagttctgctgtttgctaggccccttgctcagttacatcttcaccagctttctgtttctgatggtttccttcactgcctaaatttggctgtcctggaacttgttctgtagaccaggctagccttgaacttagagatctgcaagtctctgctttctgagtactgggattaaaggcatgtaccaccacaccttgacccaaatggttctttaagcccttttattaagttggaagcttagttgtatggggtcttgtcctaaggctatcattctctttattccatttcttaatctgtttatctccttaaacacaggacttagtagcttcattctgcttcctggttccccttttctcctcactgtaccttttgtatttttacttgcttggcttgctccttttcattataaatctttatgagtgaacactaataaccataagacagagtcagcactaggctgttttgaagtttcttctgccaatgcaattaattcaaaactcttcaatttagccacgggcaaactttttggacaaggacaataagcaaacacgttctttgccaaaatatcacaggaacagtcactagatctcatgttaacattcttctcctttgaaacctcttgagccagcccccctcagtgcaaatcaccctcagcaccactgcttttcatgttcctaccagtatggctcattaatccctgcttaaagcattccactgctttcctaacccaaagtcccaagatccacattcctccaaacaaaaacatagtcaggtctatcacatcaataccccactcctggtaccaacttttatcttagaagaaacaccatgactatggaaactcttataaaggaaaacatttaattggagatggcttaaagttcagaggttcagtccattattgtcatgggaagaagcatggcagtgtgcaggcagacatggtgctggagaaggagctgagagttctacaacttggtccataggcagcagaaggagactgtgtgtcacactgggcatatcttgaatatatgagacctcaaagtctgacccacagtattacacttgctccaaaagggccacaggtccttacagtgccattccctataggccaagcattcaaatacatgagtctatgggggccattcctttgcaaaccaccacacgtggttatgatgtctaatcacaatcaggacacagacctctcaaggatgacacagatgggcacaaatgccctagatggtaaaaggctctgtattagctggttatggtgtcttatcactacaatagagaagtaactaggacacagacctttcaaggatgacacagatgggcacaaatgccgtaggtggtaaagggttctgtattagctagtgtttggtttgcctctcagattttgccataaactgttggcagatgtcagccctgtggtcatccttagtgctgctttgcactaagtgatgtggagtgatgagagtgaacaaaagtcagagtccccagcattgccttcacccaggagcaggcagggagcaccagaagaggccaagggcacaggactcttgaagccacagagccactgacaggacagctagccttctcgatgtcatctacttctgcctcatccaactactgttcctggtcatgctgaaatgcatgcatgttctggggaccgtggctgttagaattctgtgggctctgcaccactttggagatgtctcatgtttagtgattgactgttgtgaacataaagcttatgtagttgatactaaaaaagaatccgtctaatgcatttctcaaaagcaatctttagaagactgctgggttctttccagcttctggctattataaataaggctgctatgaacatagtggagcatgtgtccttcttaccggttggggcatcttctggatatatgcccagaagaggtattgctgatcttccagtagtactatgtccaattttctgaggaaccgccagactgatttccagagtggttgtacaagcttgcaatgccaccaacaatggaggagcgttccagatgcccctcaacagaggaatggatacagaaaatgtggtacatttacacaatggagtactactcagctattaaaaagaatgaatttatgaaattcctagccaaatggatggacctggagggcatcatcctgagtgaggtaacccaatcacaaaggaactctcacaatatgtactaactgataagtggatattagcccagaaacttaggatacccaagatataagatacaatttgctaaacacattaaactcaagagaacgaagaccaaagtgtggacactttgccccttcttagaataggaaacaaaacacccatggaaggagttacagagactcagtttggagctgagacgaaaggatggaccatctagtgattgccatatccagagatccatcccatgatcagcttccaaacgctgacaccattgcatacactagcaagattttgctgaaaggacccagatatagctgtctcttgtgagactatgccagggcctagcaaacacataagtggatgctcacagtcagctattgaatggaccacagggcccccaatggaggaactacagaaagcacccaaggaactaaagggaactgcaaccctataggtggaacaacaatatgaactaaccagtaacccggagctcttgtctctagctgcatatgtatcaaaagatggcctagtcggccatcactggaaagagaggcccattggacacgcaaactttatatgccccagtacaggggatcgccagggccaaaaagggggagtgggtgggtaggggagtgggggtgggtgggtannnnnnnnnnnnnnnnnnnnnnnnnnnnnnnnnnnnnnnnnattggaaatgtaaatgagctaaatacctaataaaaaatggaaaaaaaaagaaagctaaaaaaaaaaaaaaagtctgggaattgaacccaggtcctctagaaaatcagcaagtgctcttcaccactgggccatctttctagtccctgtactatactttttatgacaccaaagcatgtaacattatctgttggctttaacagataatcactgtggacgcagtgccatatttagtactataggtacaccatgtggtaataatggattataatcagaacatggttttccaccctttcctattattttctcccccttctctcatctcttaagagctttttaagtaatacttcccatgcacaggaaggtacatacaaccgaaactaagttaggaatgaaattgcactttgttagtccatcaggaactgtaatacaatgtaaaacataaaaacagacaattgagggacaagatatcccttaggtaacaaatttgaacacatacaatatacccgtgggatgtgcgtaacatctgcaatgtataaatttggcttcattcagcataataaaaaatttgatcccacataaaactccatcaacaatctttctcaaatcacgaaaaataatttattttaaaaagaaaataaatgcaaatgtaaaaacttacttatatatctgtgtgaggtatggaacacatgcactcatatggaggtcagaaaataacttgtgggatttggttctctccttccaccatatgggccctggggaatcaaactcaggtcattgggcttgctagtaagaacctttacccactaagttatctcatcagcccaataaatgcaacattaataaaggaaagtgaaaataacaatatgaactaacaagtaccccccggagcttgtatctctagctgcatatgtatcagaagatggcctagtcggccatcagtgaaaagagaggcccattggtcgtgcaaactttatatgcctcagtacaggggaatgccagggacaagaagtaggagtggatgggtaggggagtggggggggagggtatgggagaattttgggataacactggaaatgtaaatgaagaaaatacctagtttaaaaaaatctaaataaataaataaaggaaagtgaaactgaagttgcttaaaaaaaaaaaaaagactgctgggaatttgttgtctgtgttttaaaaccatgtttctgagtaaaactttgaggctgggctctggttctggagcccaagcaatggcaactttaaggagattaatgttgtcctcatcgttgttcaagataaaactttatcatccccaggagccactaaatcaaaatgccaggaatcctcttgcttataagaaatttattggaccaattctcttttagcctctggtcatagccatttaaaattttaaatgtcacagcagcaccagaaaaggatttattgaggggacacaaattgtgttatctgacccagcctgccttggtagacaaggtaccttggagaagcctttgcctttgtcagttgacaagaccccttgcaaacccaggctcctggcagtctagcaatggtgatggtttgccaggagaacatgacaattttgctcacacttgagaccactgctgttgtgcttgggttgtcattttccacagtggatgaagtgaattggaaaggtgctctctctactgacaaccagctacagctacagttgagttctttcccttcctctcttcttcagcatccacagtcaatcatgtacaagtgagccggggtgggggcggggtgggactgagtagatgcttggttggtaaactgctgccttgaatgcatgtgtttcgattcccagtacccctgtaaacagctggatacagctatctacagtatatgcatgtataccatcactgctggggataagaggcagaaggatccctgggagggtctcaggataaccagtttagacaaatcattgagatccaggctcactcagcaagagacaccatctagaaaccaaccaaccaaccaaccaaccaaccaagaaaatgtgtaggaaatgtttgaggaagacaccttacattggtctttggcctctacatacatgcacctgtacaaactgtacaagcattgttcaaatgcaggaatacttacacacacacacacacacacacacacacacatacacaggaggggggagggtatgagctgtcctgcagatccatatcctctcgtcatcactgacatctacataactccgtctctacttgtttctccccgccccccgcatcactgacactcagtgtctgcgcatccttctgtcctgaggcgtcagactggggggctagccatggaaggtgagatatttatgctatgaacgcttctttctcccaggacctcccttgctgcttggggagtggagggcaggactggggtcttggcttgcagtaagaacagttgctttcttcggagggccatggctgaactgtgatgttgtgacctctgtgccccatagttcttctctagctacttggtccctttctcacaccctgccttagaggctttgaaaagtttgaagcataagagcctataatggcttccctggtctcaggaaacctcccgatgaacaagatgacattttttttctaccgttgagttgcttctgggatcctgggaagatacacacatgcatggaggcaggagagaggctgcagagcttgaagtgaatacagttaatcccacccagtagcacccatctgtgtgagggcatcactgttcactgtattgtggggcttcacagtctccctgaggccttccctctgccctgctgagcacaccctcccagggcaacactgtcctctgaggcagcaggaaacacttgcctttccaggcctgtgtcccctgcagtgtgagcttctctaccctcctctcagcaggcataggcttcagcctctgaagctggaggggagctcagagctgttctgtgcaggcatccccaacacccccctccagtgtgccaaagggctcctctccacacttttcacctcacgaatctggcttcctcctactcctgtctgggattgatgtgttccgaaaaactgtcttgtaattattgtctcctctggatagaatagctaccatcttttgatctctacttttattaaaaatatcaagtgatatcacgttctgttaatgttgccatgtatcagggtcctgagaggtctgcagtgagcaagtggacaccgaggtgagccagggaggtgactatagaaataatgatcatcatgataagcccagggggttgataattacagccattttcttctcagttaccacaccagtgacctctgtagtgtctgccacatgcagagtgaggaggggctcaaagcagtggatggtcaattgtgttctgacttccatggacaactacagtgctgctcagagctcagtgctgtgagatatgagattggagcagatgtactattctccacccagagtccaggctaccctcctggctcactctctgtacatgtgtacatgcgtacttgtgcatgcatatgtgtgtgtgttcatgtgcgcatgacacacatagtgcttgtattgtgtgtgtgcatgtgtgagtgcatgtgtatgtatatatgtgtgtgcttgtgtgtgtgcatgtatgtgtacatgcatgtagatgacatggaaatgtgtgtgagtacctaggtattgggagatgccagggtagaggtaagggggttaagcttaagaatgaaatgtctcagggctggagagatggctcagtggttaagagccctcactgctcttccagaggtcctgagttcaattcctagcacccacatggtggctcacaaccatctgtaatgggatctgatgccctcttttggtgtgtctgaagacagctacagtgtactcatctaaataaaataaataattaaatctttaaaaaaaaagaatgaaatatctcagctagatctttgaaatggggaaatggcatctctgaaccaggagagtggtgtctcctcaacttccctcccttggagatggatttgtgtagggccatgcaaccttgtatagggctaagctgccccatgtggtcactggaattctgaggtgagggtgtagactataacagcatgaagctaagagagattttacattttattcagggaaaggagtgagacttgacgctgagcagagatcatgggccctgtgctgtgttctgagagggttagcccatgtgtcttgagtcaggatcagcctgaccagccttctaccacctccatgaccacgctgaggagccaaagacagagcaggcttagggaggcagtttgtctgtctgtatacagaagtcattcacttcctccaccctctatcctggagtggggagagacaactaagagaatatcacaagggttctagggtacctttccttgtccagttatatcatggttaccttacctccaatagttttgagacattagatttgcaaacacccacagacattgtggttcagaagcaagattaggaaagagaaagagggccaggactggggagtctactcccaggccctttggcagctggtctggaacatacaagcccacacctgctatctggggtctatggaagatggttgggttgagacatttgctgtctttcctctggaccatttctcccacctgctaaaaagggcactgacaagttagggggttctaagcagaaggctttgtatcaggtctcctctgagagaggccagaggagggaatgaatgtggcaaactaagggagataagtatccaagaaagcaactaagaagcaaaggtggtttttcttgagggtgtggtggagaagggaggtggtgtcaggtttcaaagctttctgtctatttggctccattgcttctgggctatgatgaggcagaacatcatggcagaatgagatggcagagaagagatgctcaccttacagcagccagaaaacgggaaaaaagggacaagacaattcaagggtataccccagtgacccaaataggtcccacttcttgagagtttctgcaatccccaaattaataccactaactggagggcacatcttcaacacagccctgggcagcccctacacaacttaagccatgcccaagggtctgagagatgcccacccaaggaattaataaaagctgctttctgaacactgctcttagcaaagaactaggcagtagaagacactccaccgggagaggctccctgccacagggctcacagagagtgctctgctggatccaccctggcctagggaaaagcccagacccttaggaagaaggaagatacctgtagacatgttccttctcctcagctaatagaaccaactgatcttcactgtgctggacagaaggaagagctttaatgcatcagtgagactgtagttgggacaaaactagacaaaggcatccagaatcacccttggttctgtgaaaggaatggccatgtcactgggagtcccgtagagaggagatgacacagagtagctggggacagttaaagaaattcaaagaaatcactgtgaaatgtttccctggactcacgtgtttccacacctggtcctcagctatgtggtgatgttctgggacatggtgtaaccattagggtggggcctcatgtaggacgtggaccttcaggtttatgatgtgagtaaaacctcactgccacagccatgagccttgaaaggggccaaaccttccttaccatgacggactgtgtcctcacaaactgcaagccaaaatgaatccttcctccctcgaattgcatcttattaggtggtttagtttctttcttcttgctgtgatagagtaaaagcagcttagtggagagagggtttcttttggttcatagttccacagaagatacagcccaccagggtggggaaggcttggtgtcaatagtgtaagcatgcttaagcttgagcttggttggctcaagtcaggaagcagaaggcaagatcaggaagtgggctagcctgtaaaacctcactccccccactcccacccaggggcatgcaagatgcctccccaaacagcaccacccaactacgaccaagagttcgaattcatgagcccctggggggccatgtcacatttaaaacacacataagatacttggttctagccacaagtaaatcattaagatgcttggtaaatcagtaaatactgtgggagtggaagaaagatgtgcgaacacacatgtgatgttcccaacacaccagtcactcctatctttgcctcttcacctctacattacacattcggtctgtggggccacaaacctaatgggtcagaacaaaacaaacaaacaaacaaacaaactcaacaaatgttcagagcctgatgtatttgtggttgatgcaaatggggtagaaactgcctcccaggccctccctgaagtctggaagtaaattctgagcccaatacctcattagtatgtgtgtgtgtagactccaatcaaacaagggctgggaagggttattatttctgccagcaaagtgggccagctgagcctgattagtattgattggaatttcttcctaccaatttgcttattaatgtcgatgtttggactccttgtttttgtaggagcggctgtcctgttccttttaagtttctcttcatttccttcccccttgactcctttttttggagtgacattgttcattacaaaaaatgttttgtgcagaatcagagctgtggtcctcaggggtttggtctcctccatttgttcttcccaacctttctctctttctcatcccctgtctaccactggggcaggatgaggcatacaggtcactgtccctcagcgactaatagtattgtcccaaaatgcctgggcctgggggacactttgctatttctttgtgtgtgtgtgtgtgtgtgtttgtgtgtgtgcgtgcgtgtatacacacacacacacatgcacacacaggcatgtgtctgagtgttgatatgtgtacaggtgaatatgtacttgtgtgtgagtatgtggctatggagtccaaatgacaatctccactattatttcccaggcaccgcccaccttgatttccatttaactttgtttgtttttgagacagagtctctcactagcctggaactcgccctgtaagctgggttgtctggctggtgagcccaggagcctgcccttctctgcccgctcagcactatgctgataagtgcatgctcccaatggctttttcacatggttttgagggctgaactcaggtccttgagcttgtgacgtaagctcctcgttaactggactgtctccccagcccaaggctttgctcataggaggtgtcttctgcctggattttacaaaacaaaaaagcaaacgaactctttagtagtctcaaaccattaggacagtaactgcatctcttgacggtcaatgtgtctcctaccctctgctggcctctagctgggtattggtaaccatcttagctgaaaaatggaagccccaggttcagtgaaagaccctgtctcaagcctccactctgaggggaatagttaggatttgggttatgaaccgtgtactcaacccagcattccggcccaagtgtcctttccctctgtgacacacatggagaccatccccagagcagctccatcctccaagaagacgtacaggcagttctgcttctagtttcccaccactgattacagagtttgtcttagaggctgatgagaccaaagctggaatttcacttcataaactttgcccagaacaattcatagaccttagattttaccctgtcagccactcacaaataggtatggaatcttctagaaagcataagcatgattcagaagttattcaatatcactgataaacaactgaaaggatgatagcttcctcaagggatggttagatgctgcttctctcagaatgaaggagagtctggtactgtagctgtagaaaaacctgtgcacaccaggcttcccttcacttgaacttgggtagagtttacaattgtcctcaaccctaggtgagttgggccacggaaaaggtctgtcaggatgtgacactcatggttgggtgatgtcaacagagaggctggatggtgctgggaccacttttcagaatatagtttattttaggaataaaaccagtgtcttatcaatcggtaattgataaattggtaaattggtggtgagcgaaacagaaacagaaagagggggacactgtgattttaaaatcagttcctcaaaatatatgttctcaggacctcagagattcactggaggcagatgtgtccaagaggagcccgatcccctgccttcctttttctgactccagaaacccgcagtcagaggctcaggcctcttgtgtgcctaagggactcctgccaaggagggcatggggtcagtcacttgctcacaagaatgaactggaaagacattgagtgattattgattatctaatggctaagcagacatgggtggatcaggttggatggcattgcctgtatgggctcctggataacttgtcccagaggctcagaagaacatggttctgctccgtccccattgccgtcctgtgcaggggtcactctgcacagacccatgttcctcaccttgtccctcagcttcggcagtgggggtggccactgtgtttgaggacaatacgatctttgatttggtgtgtgtatctgagaatgggtagaatgtatgtctgcatgagtacgtctgtgtgtgtgtgtgtgtgtgtgtgtgtgtgtgtgtttgtgtaaggcatggagcttcctcttctctcgctccaccttattgctttgaggaagagtctcactgaacctggaacttccgttttcagctaagctggtggccagcaggctcaggtgattcttcagctcagttttgtttttttttttttttgttttttttttttttatttaaaaagatctggcctgggagagcttagcaaagcgaataaaatctcttcatttccaagtagataaccaacccctgcccttttcttcacacctccagaaccaccatgagagagaggcaaaagctggtcaggcctgtgtggtagggattggatgcctggtgtgtgatctgatgggggtatccttgggaaaggtgtcagagggattgaaatggaaggggcagggctgtgttgaggccagcttagtcccactgatgggggcctcatctggatatagcgaggggattgtggttctttagtttttttgtgtacttctgtgtccaatgaggactgatagaatagattgtgtctgacctgctggaatgagattggatagttcactgttcaccagctaatagggatctgcagagctcttacctcacctggcaataaagcttgcaatgctatctctgttgtgagcatcatgcacatagatggacctttgtcaggagactgagacaataatgctatttacagcaagatcctgaatgtgcgtcttaggcccattatctgatttgattttgtgcatgtgtgttatgtgtcggtacatagatggatatctgtgaatatgcatgcatgcatgtatgtggaggccagaggtcaacccaggatgtcattccttaagaattatactgcttgtttctatgaggcagtctcttattgacctggaattcattaattagactggctgtccagcaagccctaggaatccacctgtgtctaccttcccattgctggggttataagcaagcatggtcgagcctaactatatattttagacatgggtactgggaatctgggattgaagacaggttctcaagatttcacagtgagcacttaaccagctgtattatggaatatactatggagaggggtacctggagggcccatgccaaggtatcctcctgagtaattacaccatgcaacagatctgggttaaagagggtttactggaggaagggaggggaaggggaagggcctgagaaggggtagaggcagatgagtggatatgtagacaggcagatggatgggagcagagctataagggcagagaaggaggcacagagaaggaggcacagagaaggaaataaagatagatagatagatagatagatagatagatagatagatagatagatagagactctccctgttggactgggctggtgggcagtccttttatatgaagcccactggcactggagcacctggaggtggacagtaatgatgtaagcattgctaggtcactgggcagagcctactggaatctcctgtatgctaacaagctgagccatctccccagccacggtttgatatttttctatataatattcatctaaaagtgtatcacctattcattttaacaaacttttctgagtcttcccactataaagaccttgtttgttctgttcataatttgaaagaaaaaaaattttactctccctctgctcagtaaatatctattggacagatagagtaggttatgagagcccgggaagggttttggcgttaaaggttgctgggaagtggggtttaataccaggtgtggctaattccatttggtgtgtcacttagcagctattagatggcactcttagctcatgttgcagccacgctgatggtgtggcatggcaggggtctggacctcagcctatcttttttcctgcatgggggagccatccacagaatcggccaggtcttcccttcagatatactcaggttgactggccagagacaggttcagctgtgggctgcatgcttgactcaggctcagtgcttgtagtcttgcaggtagctcttgcagatgtggtttctgtgttcagccatgcagtcgctgatgccacccaggaaggtaaagatggcttttgtgacatcagcgaaggaacagaagcatattcgagtctgtaggtgtcatctgggaaatcacagcattgtcttcccacggagttccaagtgagacagggttgtcagaagtgttggagtggggtgtctggggttggtagaggagggcaggctgtgctcctctctgacagctcccctcaggccctttaggccccagtaccctgtttgttatctgggctggagcattgcctcacacagcatggtgccggggttccctacactttccttcccatgagacctatggagacctccatgctggcactccttgttctctgggttcccttttatattattgtaggacctggtgctcctatattttgttactaattatccctttagagtcaggaacaaagagggaagcatccatggcgcctatctggcttctcacagtcaacggtttcttctcttaaggaaagacacaggaacattcatctatcacctgcctttcagtaggttggtttcctgcaaacccagtgtttcccaggcacatctggatggaaggactccaggggaagcatctgctctcttggagctgcaggtacaaagaacagatgcgaagaggaggaaggtggtgttggcatttgaggggaacagaagagagcctggagtggttgccagtgggaggtagccacagagtgcacagggaggcagctcaaggcttttcctagccacacagtgagtttggggccagcttgttacaaaacaaaacggaacagaagagcaggagggagatttcttcttttgagttggaaagttctctgggaaagaccaggtccagctcctgagctacacaaaccacagacccgcaagcaggctgttgacggcaggaggccagaagtaacaatgtttctctcatgtacgtgctctttgttataatagccgactggtattaccaacagcctctgatgctgtgttccaggcctcctgagggctaggttgagcctcacagggccatggggtgaagtaatttcttccttagcctggacccttgacttttgccccagtctccaaggagatcctgggctatttgtttgggccagcagagggctctttttttttcttcccttaaatataacttaactgtgagaacaaaagcccaagatcttctgagaataaacccatgaccacagaaaattccattaatgtgtatagttcatatgtgcttgtgctaaaatatttaaaaggatataaatccatctataatttttaaaaatgcccgatagtgaaccattctgtaccttacaaatctgtataaattttatattcatcaaatgcataaattacatttacattaaaagtttgtagtgattaattctgagaaaagtaaccaaggcagtggttaacatgacatgacacaacattatatgataggacatttatgacaagacgtgacatagacaataaaaagatgccagtttcagagacagttcatgtctgtttccttacctaaaacatggttttccagctgtcagttggttgaacctggcatctactcgataaatgtcttgtctttgtttagttgttatgcatgttggcttacactactgccattttctctctctgcttttatattaatattctttggattaacagattattatactgtgatattccgaggtggatacattgtgaaatgtttaatgcaagcgagtacatcgtggcctcctgtgctgatctcttttgtgtggtgagaatagctaagactcttgcctggcctctggcctccgtgttggctttgcctgtcagctggctggtgatctccccggggatgaggctttcacctcaggtatcttccctcctcacagtgcacagggtactgacacccagtaacttacaactccctggagaagatgagctcacagtggatggggagttgttggattaatgagcagatactatggggagcatggatcacaatgagaagaccacagcccctacagggcactggggatgtagaccccaggaagccttccttacaggattacagctcatgactctgataagcagtccgttcctgggagctgtcaggtggtctggaggcagagtgtacggctgtttccagggtgcccgttagtaagaaatatattagcgcacaaatcacacacagatgctaatgagggaacgtgcttggaaataaaatgcttttctaatctggatgttgacatcggggatttccacttatctgacttgttaaggaaagtgatgcccgtaaaggaagcagtgtttagcaagtcattaaaaccccatcaggttgaggggtgggtgtgggcacaggattctgagctgctggggtaatgaaggtcttgacgcttgggtgaatagaatgtgtggggtcctgctcaattcttacaagatggtatttgtcacaactaagctgacacctatcaaatgcttgctgtaggtgaggccctcttctaagagctttacataccacattttaatctttatttgcgtgtatgtgagtatgcatacagatgtttacacccatgtgcacatggtgtggaggccagtggtcagcctcaggtgcccccctctggtgcttcccagctgagttttgtgagacaaggtctcactgaatctggagcttgctcttctggttggcctggctggccagcaggtccctgggagcttcctgctggacctcccccagcatgtggcaaattataggagcttgccaccatgcctggcttttatatggactctaggtacctgaactaggtcctcatgcttgcatagaaagtactttgcccactgagccagcccactgcctgggtaaggtgggtttcattacccttacccctcgttaggggcttgaggctcagaagtatgagctctgtttttagagtttcactggtacgtgaaggcaagactagaatccagggcaaattcctgttcttaccattgacacctctctttgctgacacggctcagggtaaagtacaactgtctacttggcaaggacccagaggaaacacagagtgcactgggcatttgtagagtcgacttcggtacctgataggcaaaggttcctgtgctccgtgaaaattaaatatgggagcaattacatgtttgcagaaatagtaaatattgaacagcctcgggaaggctcacactagagagaagggcagtgttaatctggggaggcttctagaagaatcccaagcctgtgtcagtatggggtgggggctgttgatggacggtggttatcgaggcaagaagggctcttgagtggtgtagggtgagatccagggagagcccctcaggtctcctctaggggaaatctcagtgatgaggtctgaggtcggagcaggagtccaaagatccttcttgcctgctatgcagcgctctctgtagcagcacagccctcagcaaaggtgtggaggagaagtttggtgaatctgccagttccccctcagctcctctttcatcttttccatggtcctgtattattttttgcctttttggactctgttgggtttcactccagctctcttccttttgccctctgactaactcagcagatatttcctgagctgcatattagcgcatatgttccagcattgaacctgtgctaccataggttagcaaatatagatcaatgtgcacaacactgctattatgttctagtgtggctcccaggatgggtgtgaagtcaggggacagggccttgatcctgatggtggctgctgatatttttagagctaagcagagaatgagcaccctgtactagggactggagaagagctaggcaggcgagagggaaggagcctcaagagaacagaactttgaagtgaacaaggatggtggggctgaggaaggatgctctcgagagattaggggactggagagcttcctaaaatggtttgtgtacaatcccgaatgaggctgtgggtatttatagaaacaatatcagaaaggacgtattcaagatgtagctatttctggatgtttaaaaagattgtctgcttttgagtgtgagtagtactatattggtaaggcttgaggcagagaatatcaaaagaggaaaaggcaaggcagggtcgatgcaaataaaaaaataaagtagataagacaagaagaaggtggagaccgtccattgtctttggcaatatggaggtcacggataacattgatgaaagttgttggagtggagcagggaggagcagatgcatcgggttaagggatgaatgggaggggaaggctagaggctgggccaactcgctgtcaaggaccctgaaagacttttgtacttagaattgggcctggaagaatttggaggatggcagaatggtgtttaaaaaatagaaaaagctagagggatgcctttatgctaaagagagaactagttaaaacaagtgtgcaaggggaggcagccatgtttgcagtcacagaatagacatctcttctgtggagaggccttcatagatgagtaggtgggtgggtgagtgggtgggtgggtaggtaggtaggtgggtgagtaggtgagtgaatagttagatgggtgggtaagtgggcaggtgggtgggtaagtagataggtgagtaggtgggtgcatagagggtgggactaaaggagacaagaatgtctgtggttaggaaagattagaactcttattctagaaaagtattaggttcaaactgggtatgaactgagtctgctctggaatgtgtgtactacagaccttgctagttctaggtggtatgtgagttgcatgagggcaccttgcctgaaatatttcctcataactccagtgctcagcagtatgcccagaacatagtaggaattcagaaagtatttgttcatggtatggatgtgtggtcagaagagggatgcggtattcctcgtctgttcttcactgttgtcctgaaaatggtgtcataccacggccccatgggagaacaaaacactaactatctaacagagaagctgacagtgatgggctgtggattaggtgtgggatgaagggtggttggtatcagggcttgctccaaagtggacctttgggaagagatgaagctttcactggacattcaacaggtggtcagtgaggagctggttctcagtccatgttgcttggaaggggagagccaggactgaccggcagaatgtactggaagcaggtgctcttccttctgaatggtttaaaagtgcaaatgtccgtctcgaggagtttctcagaaactgagaagtctgaggcgcatgctggggctcctggatgtaccgtagggctccacaggctcagatggtcttcacaacctttgtgtgtctagcattctctgtgcccacaatagaggacatggtgactttctcccagatatcttatggtaagttgacacttacctggacttgcctgctatgcttcataaacatgatgttgattacttaaagaagccgaacaactctctaaattgaagttattgccagacatagtggtgcatgcttgtatccccagcatctggaaggcagaggcaggaggatgagggtccaaggttattcttgcctacataagcaagttcaaggtcagcctacaataggtgaggccctgtctcaaacaaatgaacaaacaaaaccacaaaacaaatcaaacgaaataccataccatataaagttatgagcacagtcattagaacttaatagggaaagggctaaaatgattaaacactggctatcatgctctttgcacactcaggccctctgttaactttctttgtacacgcaggccctccgcttgctctctttgcccacgcaggacctctgtgcctgtcattcacagctgtcagaagaaagagggaagcccggtggaaagacagacctcagcctcagctacccctctgccattggctgtgtagccatttctattctgagacaattcagacagaggagcacacactgctgagactgagccccttaatccaggtcctgagactggcgtggagtggaaccaacctggcagctcttcagttagggaaatgaacaacttttccaagctgtctgttttctccatctgtaaactgggtgggggggggggcactcccagtctagatctgcaaactgaatcggtcctctaagatgtttaatgaatgcaggtctcaaagcgtttcctttctcctcctccgtaggcaacatatttgcagcaacggaagttccttccctggttgatacaggtagaagtgtccccggtacaacataaattagtgtggtcaccacaaaaatcagcatggaggtcccccccccccccaaattagaagtagagctactgtgtgatccagctaacccactcctgggtattcgcttgaggggttctatagtgacacaccatagaggtgcctgaacgccccgtgtttatctttctatgggctttagggatttgaactcaggcttttttgcttgctagataaactctttccctaaatagccttcctcctaaagcactttccctaaagagccttcttcctacctatgtatatgtatatatttataggtgtgttttctatctttataggtatatggatgtgtatgacagaggaggaagtagtgttttgggagggagggtcactgggaggaaagagagagttaagagggacgttcatgtgggatggttctgattatatgtgaaaatgttttaattattttaatgttttttaatgatgcccattattttctacagtaaggtacatattagaagcaagtacttaaataagtttacactaacaataggacattaattaaattaatcaccattcaaagcagcatcccaagacacaattgtcctgatagcattactcagatacttgcatggtttgtgttgtttttcaattcttgtctagccccttggtcttatttaatcataatctgtccagtgagctagtagatggggtgagctttatgcacatcaagcatgtgtgtctgagaagacaaggcacagggtctcgcccatcaagacttcctgtcttgattctttggagctccttaagagagccgttcatttctgtatcactcttggttgtctccttgaagccattgttcagattatctcaagtgaatgtacactgaaataatcttcaaccttgtcaacttttaagatcccttcttgaaaggatcagggaggaatggctacctcttccttggatgctgggttgggaagagcctatccattttacctgggttgtactgggattaatatcaggcagctaacaacacagagctcttgtcttcagtcttttcctttgttctctcagttctgtcttagaagacccaccctccagggccctgcacctgtgaagcccatcctgcagggtccacctttccccctgaacctgtgagccccaccctgcacccatcctacagggtctacccttcctcctgttccctgcagagtccagccttccccctgtacctgtgggccccaccctacagggcccacccttccctgtgcacctgtggaccccatcctataaggtccacccttcctcctgcactcccctctatgtacttactaactaatctagtatctaactctaaatttctgtgttaatttgttttcaaggtaacaggctatttaacaaacgttgagactgttccaggcaagcacaggatgcctctggcccatgtaaggagaagataaataactctgagtcctgcttagctctgacttatcctgttcccgttaatcctctcctcaggaaagctgaggagctgagagggccaagactactgaattggtcactggattcaatccgtgttaatggtacacccacacccagggtaagccagaaggaggtagctagaaggaatgtctttgttccttgacctccacaaagtagtgacagaaagtgatcccttgctggcagtgtcacccaccttggtcttggaagtcagggggttgaggaggttgaggaggacaggagaactgggagacacacccctgtcaggtggacccaactgctttctgtttccccagactcagggcctgactatagcctgtgtgaatcagcactgagccacatgcctttctcagagtgagcccttacccagaaacagctttcttcttgactccactgagaggggacctttaaatgtaggtggagtgccatgtgcactcactttcgtccccagccctcatgaagtgacagtttcccagtgtggtccccatgcccgtggccagtgccatggtcactggcattggctttcttacaacattattgcatgtgtggtagcactcttaatttacggaaggctctgccttgtgtgacacgcacatagtgtcatccttggctcctgtgtgtatcatgccagctcttaaagtattactctctaatgtgcactcaagcatgcatttggtcatcatggggccatttaagtgggtggtgttggccagccagcactcaccacatcctgagaaacgtgctattatttcctgagcacagggcgatagtcttgctttgtttccgtaagtgttgccctggcacaggggtggggagcaaacgtctcagagttattgtcacttgtgtccaagcttaagctttatcaatttcccctcccagcacccagttctaaaaggcatcttctctgatagggactgtgaatcgtaattgtgatgaacgagaggcagctgcaacagttccaccaaagctggtttgtcagagcctcgttttcagcccagaatgggaatggcctcctcagcacctccagcagccatcaggcttggcttattcactgttgcctgtatggcatcactgcctgtatgacatcactacatgacatcactgccttatgacatcactgcttgcatgatatcaccactattttatctcacttgcttcacattctggccattgaaccccatctgtgctccctacagaaaagtcttttcatggccattgtgctccagtgtcctgggtgtgtgtgtgcctgtacctgtgtggtgtgcacttgtgtgcatgtggaggttaacagactatcactgatgtcattccctaggttctgtctaccttatgttttaagccagggtctctaacaggcttggatcttggtattaggctgccttgctagcaagctgattgtgaacatggccctcagtggtcagctttcttacatggggctttaggaatcgaactctgttccacatgcttgcaaggagaacacttcacccactgagccatctccccagccaaaggcactccttatgggtgtcttttgtcctttcccaactacaatcccgatttctggacttctctgtgaccaacacactggggtgagggagggtgtggatgctggagaacaagggcttggtttgttgttgctttgtttttatttttctagaaaacttgacttgggcgcccccaaagtgggcaaaagagtcatcctcctgcaggcccgtgaaaacaccctcacatgcacctgatgttggtggccccctgaaaagcctctaagagtcaaggtcacaaattaccattcccaacttaacttttaatttttccttgtttgttttgagtctcactgtgtagccctggctatcctggaactaagtatgtagattggtgtttgtgtgtgtgtgtgtgtgtgtgtgtgtgtgtgtgtgtgtgtgtatgtgtctagaattgatagagatctgcctgcattggctgccttagtactaagattaaaggtgtgctttaatcttaaaatttgttgtttcactttttggataaacctcccagtttttggtacttctggcagctcccctgggaaaaatgtcagcagataaatgtcttaccgtccaggccctgtcagctttcttgtttgtttgaggaacctctgtgagtggtttaactggatttctgagagcacagtgagggtgagggtggggcggaatgggggtaagcctgcggtagtgtgtgagggtggtgggcatttatcaagtcagcttgctgcagtcactgtaggcagtgtttacatccagtgggtgaggaggagggcgggaagaacaggagaagatgaaggctgtagtctctctctcggggtccctgatgttagaagagctttgattttctcctgtgtggcgtgacagatgttgcttgtcctccacctaaacagtggtctacagtacaggagcctggcacaggaagtataaagaaatgtgttaggctgcaatgaacatgtgattccaagagataagaaatcaaagggtgagagagggctgggggtgatagctcagttggtgaagagcttgccttacaagcaggaggacctgtgtccagttccttcagcccaggtgggtaaagctgggtatggactatgcttctaatcccagttctggggctgtggagataggtggcttcttggggttctctaaccagccagcccagctacttggcaagcttcatgttaattagagacactgtctcaacaaccaaggtgtgtacataatcacatcaaagagtaaggttagatgagaaaaatattccttgaagtgagtattggaccctagtagaaggaaacatggctgaggtaggctttggaaggactacagggcctagatccaggatgaagtcactaaaagggtggagtctatctaggtgattcaaaaggtagtccaggcaggagccagttcaaggctgacttcggtagagccaggctgatgggtctccattttggtcataaggcaatgggggtctgacgtagataatatgtctctaaggtaaacacttggaggctgtgacagatgcattcttcctggggagaagagctttttgggcagccagtttcttttgccttgtaattgtatatccagctgttaattttcttttctgtgtgaccactaactagacttttcacatgtggttctatgttgccatgggaacctgaggtctgctctcagcagagcctctcctcttgcctccgggaggccccgtccagcatggctgcctgtgtcattgcaccgcaaatgcagatggagagtgaaatacctctgtaggcctcctggcatttctccactgcacttgtcttcagaacacttttttctagagggcccaaggcacagcaccagtacagtgaccttcacgttgcacacggtccttttatagcacacatttcccaagaagccatgacaaatgagtgtgaaaatgagggccaacagtgggtaggatgtgggtgagaggcaggcatcccaggaggaacagatagtgcagttgctcaggagaggagctgtgtgtccatcagaggagctgtgcctgctcccaatggcaatgctggtctttatgtctaagaggtgctgatagaccagagggtggagagtgtttctggaaaggggaggatgtccccttgtccctttcagtttgcaggggaaggaggagtgtgtgtgtgtgtgtcacatcatcccccagattcaccccttttgcatccggcttgctgtgctctgccccatttcatgtggcctggagaggcatgtaagtgcttttagtatcctcttaggaggaaggtaggaagacaggcaggcagccaggaaatctcagtggttattaaactgagtcttcaaggatctttttattagcgattaggcgatgctcgacagcactaaagagtctatactctctctttctgccccttcgagtgaaactccaaggaatctgcttcatgtgtttatttatagcccaagacaaaggcaggcctggaagaggggttagaaacccatggggagaagccacagtctgccttcaggtgacccttgccccaaggctgcccgtgcctctgtccgcagagtggaaagtccagaagatggcgtcttccaggctgtttgttcagggttacttcaaaggcttgtctgtcactgggacagtggcccctccagaccgttgtcagattgcttcaacatggaggaatgaaaaccaggcatggtaatgcatgcctgtaattccacagcactccagaaactgaggcaggaggactgcctttgaattcaaaaccattgtaggctattcagtgagtagtaggcaagtatattataagaatgtgtgtgtgtgtgtgtgtgtgtgtgtgtgtgtgtgtgtatacacatatacttttttatatataaaacttcaaatatacatatacacacacaaagacatacatatgtagtccccacccacacagtagccactcatttcaagggacattgtcaggtgacttttgtatcctgagtggaaggaagggccatagtgccttcgttgcagagtatgggagatagatggtttagtctatggtagagttgtctttatcctcatccatcaacacaccctcaactccacatgtgtggaggacacctgggtaacatctggattaagcagcagcagcaatgggttggatccacagcaccctcctcttcagatttagccctggatctgctgctggtgctgagtggatctgctgttggtgctgagtcaagagagatcgttagagatcctgaagtcagcaggatggagttcatgtgctacaaaagatacaggagtgcttgtctctgtgatgatgccatttacgtgacagctttgtggggtgtaactgacaatttgcatctcttcctattaacatttgatgccttcgaacagatgcattcacttaagaagtggaaaccagagtcagaggagtagacatatccatcacctgtgaagtttttctcatctgcctttggctttcttcatttttgtttataaaaatagtctatcaattaatttttcatcccccggacaaaacacaaggcagaagcagctgaggatgtttgttttgtctcagtctctgaggatgttgtattgggtgggggagggagaaaacaagggcgatggagacagggactctgtcagcagtggcaggagcctgttggctttgtctgcaaggtatggataggaagctaacaacacaggccctgcctcaggtaggctgcttctggacaaataggcctcacctcctgaaggcgccacagttggccaggacacctgctggggacaggacattttagatccactcccagaacacctgctggggacaggacattttagatcctatccatgataagtagcaagctattgtctgtgatgctggcccattggcaagtgtacaggcgttcatctgttatcagatcctccttgttcgagcaaccttgctgaaggaacctggagagtgttctgctgagagaagccaacaggtccagtatctcttgcatggtccatttatggaagggagccatcatagtgaagtatatagagcagagagaagaatgggagttaccagggcaggggtgaggtaggagggggcattactcatcaatgcaatatgaacacatccctgagatctgcctggccttacggtcctctcatttgcagcccagcccagatctctaagtgtccttgccacaactaagcagggaacatatgcctcccgaatccttttaagaactcatctgatctctacagacactcacatagaagaaggtggctgtaccctctgtccacactggctgaggctctgcaatgaagcatgcttctaacgggcctggggatcctgagacaggcagatggtcccactgggggccttgcctctggctcctgagcacgctctccttgtcctgcactctgctgctgccctgggctagcctttgcagccttttgacattttctgccccaagaaggcagagctctggagggatgagctctgggtcttggactctgaaggccaagctgagtgtttctctaagctttaagcacagacccgtgctgagcatagcacttcagtcctcagagctaccagcgtatagataagatgcaacttgactaagtttgctgttttgagaaaaggttttactcaaactcacagcaatcctcctgcctctctgccgcccacctgctaagattataggtatgaaccaccactacgggtactttagtttttattttataatttccaaaattttctgcagagagacagaacatagaattcttattaggagcttttcagaaccgcataagccatctttacccaacacctttcagtgaaggagcagaaaattcaccaggcctggagtatcccctccgctttacaatagacttctccttgctttctggaaatgatcaactctatggttgcccattaaccaactgtggcttcctagttattaaagttccattatgatctgcactgaatggaaagacattaaagcaaattatgttcttttttttgtttgtatcctcctttaaaaccctttataaataatctttcacttcatagtgaggaataaacactagacctttatctatgtcctgtaggatggatatttgacttgcacaccatcattatgtaatgtaacactgaaatgttaacacatactcttacacacacacacacacacacacacacacacacacacacacacacaaacatgccccctgccacacacataagctcacacttcctccctgtttagccctgttgggatcttggaatttagctgaaatggcagccatactagaagagccctgcctttgaagacattttcagaaatcagtgcaccttctgtgtgactctctaggttaaagagaaagttagaaaattcgaagggctcttcctgagaaaggtgaaaatggactgaatttaagatcaacgggtttcctgcatggacagtcattacgctggccctgctgcagacatgtttgtgaagtattctttgtggagaccatggaggaggtagagtcaaactaccctccccttcacaggaactgctcacagtcacctacccatcttcccactgactccctgtgccctacctctgactgacctgacatcttctgggtgctaagcttgttcactgtagcagataattatttggtctgtctaataatcaatgttatacctctgacctgactcaatagtagctaatggagttcaccagtccaaacatgtttgtagtgatacattgttctgaaaaatctcttgaccccaaagagactgatctttgttggaccttgaagccaggttaattatatgtcttgagatcatataagactatgtaattaacctgctagcctactgtgtactcagcctgtttacatttacctcgcctttaagagaacaatttaaccaactttgcttgccttagatttcccacccaatcagcttttacaacctcggctaatgcatagctttaatcttaagttatgtgcacttccatgccctaacccaagcgtgtatatgtattatagtgatcatttgctgaaagcagccaacagattaaaagcaatcataaaacaaattgtaccctaaatattgcaaacaacacagggtatagcttgataatatctgttgcaatcttgagtgctattcagggtcagttaagcaacttcttcctgtaaaaccctgttgatgattctgtaaagaatcccgatttcattcccatagcatgatttctgtattgttccataaatacagagcaaagtccatgggtagggagaggcacagcacacagacaaaactaacaacacagtttcagacgcatgtaacagacagaccacagatcagctgtgaccacaaactataggcagacacatgcggagaagcgaggaactgaaacatgggcttgtttgtggtcaaattaaccagagagaatgttgctttggtttccttccctagtgtggctttgatgtgttttggtgacctctggggttatcctatcgttttatcgatgcacaccttcataaaggagcattattcgcccaaagcaagatgacctggttttagttaataaaagacaatacatagtggcatatagttgtaatcaccactgatgaagctgaggcaggaggattgtcacaagtttgtggcccgctgggcttttcactgtagactagtggatatgccatctgtagatctgaccaaataaggagaccttttcccacaaggacgactcccattgtgataatggcgcaggaacacactagatttaacttggacctctcaggggcaaaacaagcttcatcattatttcactgaaacttgtcttgatgactgtctacagtatgcagagagcacctggcaagggcacccagtcaggggcagacatcgtgaatgctgtctacctattgcacgcagcttcctctgtggggggggggggtccacattgtgtagattctgcaagatgtagaatcgaggcctgcagagatgcagacagggaccacccaagtagccaggcaagatgaggctcctgctgacttggtctcagtgtccccaccagaagaaatctttgtcttgctgtgctcagtggggtttcaccaggaggtgagtggctgtgcagctcaccagagtgcctcatgtgactgcttttctgaggcagacacacctgtgttcttagtaaccacagaaccaggctggcagatgcattgaagagagatcttctattccctcttcttccaaacctactgtcttccagagtgaagagtgaaggctcacccctcttctggtttggaacaaagcagcttaatttctggtatttaaagaattttcagagactgtttttggtcagctgtcatttttgaaagcaaagtaagatcttatggtttaaaatagctacatgtgatgaaggggtggctgttaggtggctgttgcggcatccagagcttgcagacgggacccaatgccatgtctcactggtgagaggcatggcaggcttttattctgtactggattttctgacttctgcagctcatttttctttagtgcatacagccttatcatgtgaacaagtctgcaaatactgtgatatttcctttaaccacagtcattctcagtgttactgaagatgatcatgatgtgcagggtaagaggccacagaagttccagcccaaatcccaaatccctgagtagtgcacactgataaccaagaagcctctagggggcagccgagctccaagtaagacctgtgcccctgcaggctctcaggcttgctgcacactccttggaggtgtcccttcagcagcacccagccctttcctctcaagccacactgaagtgggacacactggtccagtctctcatatcccactttctttcctaattgccttccctcccactctgtcaagtcttcctgcggacctggcaccatggcatgaggcctcacagcaagaccagccacggtttcacagccaggcaggacatatttctgcagaagaatctttaggaatatgccttaaagaagcagaaggaacacatgtatatacaggattgtatgtgcacatgtgtaaacagacttacatatgcatgcatgtgtgtgtgtgtgtgtgagtgtgtgtgcacatatataaacagacttacatatgcatacatgtgtgtgtgtgagtgtgtgtgcatatgcatgtatagggttgtatgtagacaagccagaggatggtgttggatgctgtttctcaggcaccggccatgtttttgtttatgtttttgaggcatggtctccccgtttccaggagtttactcattagtccagaggtgctttccatcgatccacctgtctcggcttttattttagtttctcagtctaggaattggatttaggtccttaaatttaggtcctatgctcgcaacagagccatcttcatccacttcaggaatatgccttaatatatagccatctaatgtataggtgcctaatgtataggcacctaatatataggcacctatatatgtataggtacatcattcctaatttgatgcctgggatggatttatcttccacatgtttctgaagttgctccattgtaaagtggctccagtgttctttctgactaggaagaaaggcaaagggaatgagccttggatacaaggaaaaacattagctttggtgatgctagttaggctatatcttggcctttctcctcctcgatgcatctcttgaccagactaacttctgagcctctgtttcctcactcctaaaatggggttagctagggtgatggtatgcttcatttgagagcgagaggaattacagatattacagagtgagagagagtataaaagcgctaaagtgctaggcataccttctgtgcagagagtactgtgatgtggaggatggagcaagggctctgtagaaaacccattgcgaacacatcaggggtggagaagacctacactcacggagcacgtgctcactgagtggaaaattactggagaaacactgggatttagggagactctggtagatagatctagtgggattctttgtgtacctatccatgtgtagacacatggaggccagaggatgacgtcagtgtcatgtctcaggtgctgtcaccatgctttagagacaggtgtctccctggactgagctcattgggtagatgagagcaacaagccacagccccttctctacctcactggccctggcattacacttgtccttgaaattaaacttttgggggaagagagtgtcctgggaatcaaactcaggtccctgtgcttgccttgcaagtgctttgcccactgagccaccaccccagtctccaacttaatgtagttcttgcctgactaaggtatctggtggaggggaaaggaattaggatatcaagggtgatcgatggggcagggagggatttgctctaaactgacctctcaactaggtggtgcaggccagtcaagcaagagcaccaaggtgaagctggggtacagggaaagcctttgtggggaagaatttgcatgcagcttagtggtaaagtgaaacctagacctcaggtacagccacaggtagtccttgccagtcagcagtcagtcagccaatctcagttagccgtggtatacaggaaatgactaaatgaagtgaggtcatgactgctccacagtatggttgagaagaagggagagaatggccagactgagcatggccagcagaacagacctggccatgacaggagagagggtgggagtagggaggggaagagaagaaagaggagacagggcaagaggatcaagagagcacatgacaaccaagaaggcatgtggtgaaaatggctgagttacagaggaatcagaagcgaggggttggaagcccccaggaggaagatgttgagggtagggggtggggagagaagctgggaggagccacaggtactgagtgaggcttgttttggggacctgacagtgactactgaagacagtagcatgtgtgtctttagatatgctcggagaaatgatactgaaatgtttttaccataaggaaaaacaaaagttggagggggaccgggatatggtggcacactttcccagcatgcacaaggtcttgagttctagcctcgggattttggaaacaagaatttgaggggccaatgtcgttgcacaatgtacatatctagtgaatctccactcaataatatgcttaattttattcattgtttaaattatttcaaataaaaatacttacaaagttttgtcatttattttctgatctgattaattttatttatttttggcttcttctgagaagcagttctatataaaaaaatgtatttttaaataaagctttttccacagtaagcaagtacaaacaaccattagggattctgggatggcaggtgtgaaccacacagcacttcaaagaatcaagtaaaaggatacttgtaaagtgtctcagaagacatcatgtcttcagataaaaggtcttgtgtcccttcctggatagaaggaggacaaatagaatctgaccagaaagaaccaaggcctgtgggctttaaaccccgtgaggagggcgtgctcgcagacttgtggactctcatagtcctgggcattactcactcagggatggagaagtatctgaggactctgtgcattggggcagacggtgagggggtgtggtcctgcactcctgtgagtccagagctcctctccatctgggccacttgcctgggaatcaggaatcagccctgttaccctacttatgcaccccactcctaccatggaagggcctgcttttagcaactgagtttaaacaatggttttactataagcttagtagtctgcactgtgaaaggcattctggccatgatggtcatcatccttacaatgcaagcggcctggttggcaccctgtgatgggctcaagagctgggtgcatctgttcagaagctctaaagttattgctgcccctctcacctcttgtaaatgaattttgtcgtgatgagggctccttggtgtgtatgttcatttaacctaaagccactccctgtggaggtttgtgggtttgtcaacaatgagtgaagtggagagttagttctcaggatgtctacagcttcctggaagtgggatttttcgttctgtcaatgataatgttggtattagagtcaagagggagagcagggagaggcaggtgcaacccttccctcttcagcatagcttctcacagcctcttttttttctgcaggtatgtgtacatcccactgggcgggtcccagcatggcctgttggggacactgctttctactgcaacaacgtttgcgttcgtgagctactggcatggtagctatgaggacctctggtgctgggcagcgctcaactggctgggagtcactgtggagagtggggtccggaggctgctagagacaccctgtgtccgggagactttggtaagcatgatccatcattgcctgtgtggtaggggacagctgagcaaggagggactagtttgagatgggtagcggtcaccagattcactcaaatatgaactgtttttgccagacattttcaaagtgtgtatagctttaggaagtatgactgggggcagggtggagaaggcttcaaaaccaatcactgtttacatgaacggttggtcagattgatgaatgaatattgtacctgtaaaggcctaggcatttattatagaaaaattacaaaatccagatgagtaaattaacaaaattcacatcaaagctcattcttctaagtatgttctgtttgtgtgtgcacactcagccattttcagtaaaagctatggtggtgtttaagccccgctaagcaggcagatcagtgtcaaaaggtttagtaaacttgtgatttgtttaattaatctattgttaattgtttcattatattgtatttacgtagatatcataatcgggatgagttctcctgaatagagctgtcaggttacaggttttcacgtgttcacagctgactctgcatggtgcatatcagctcttactgccccctggatgcccccatccccctgaatgcccccatcctcgcagatgctcccatcctcgcagatgcccccatcctcccagagcccccatcctcccagaagcccccatcctcccagaagcccccatcctcccagaagcctttgcccgtcctgagtggtgctgcactcaactgtcccaagtggtgctggtattttagcttttgatagaagctgtctgttgtattagcatagaagatagctaaggcacaaaacggcattctgaacctatagataagactgggatattaattgaacacttcccttcatagatgtcttaagcgctacacataaattttttgccttgtaagtgtggcagctgacatgcgaggatctcgtaggaaatcagtggttttgaatatgaacagtgttctgccaacccgaagaatgacccagcaggaaatgtgccagtgtctgctctcgtggcaggctgtaaaacacaaaagaggtttcactggaaaaaaatgattaatgtggataaattctacccggtgcataagactaaagcaaacacattttaaaaatcattgagatggaacaaatgcactgaagcatgtttcaataaagatagccacaatgcagaaggacagttatctcaataaaaacagatgagcacacaggagagcagcacactggaagaaattaagtatgctcatgtatatgtaaagagaagcatttgggggttggagagatggttcagcgattcagagcacttgttgctcttccagaagaccctggtttggttcccagcatccacatggatgcttgcaactctctgcaactccagttccaggagatctgacgccacctcctggtgtatgagggtacttcatgcatatgcacagacatacacacttagacacatacttaaattaaaataaatctttaaaaaaaggatagaaatcatattcagtagtggtgcccagcatccagaagggaagaagtgtctataaagtctatggagagcagtgaaagtgaccgtgatgccatgctgagtgctgtgtccgaagaggcatcttaagggtgtcttctctcttccccaaagcctgagagccagtgagcacccctgaaatccagaggtcccccccccgctcagtctcaggcaccattccaatgctccttcaagaaggccctattattaaccttgagcagaatatgaagcagtgtaccgtggaccctgagtcacggattgatagatctgaactattaagtgagtaacccaactggtctctgtgacctagtgcagactaaatcgggttgggaacaaaccaaacaggaaagttggctccccagaagttctcgaatgcaggatttggcacactgtagggtaatgacccagggcccttgcacgcttagcacatttgagaagtagcttaattgtggtttctggacatcaccttaaatagtacagtcccaaaacatacccacttttcatgtaacttctttaaaagtagcatatttgactgtgatgatttaatcttttagtcttattttctacgtatgagtgttttccctgtatatatgtctgtgtaccacactgcatgcagggctagaagtagcatcagaacctctgggacttgtgtgtgagctgccacaggaattacacagtcctcaggacagcaagtgctcctaaccactgaaccatctctccagaccccagtagcctgaaaacatcttcattactggtgccctgactcatggatccagctggccactgaacctctttttgactcccttgcaggtgtcttgactctgaacccatgttccctcatctccagatgtgtgctctatgttaacgggagcgtcatttctcaggttactcaaagcctaaaccgttagcttttccttctcctgtatgcactgtttctcctgccttctgacttgatcttgaggttttctcagtcactgtgtagccaccagaactctccttatccacactgctttcagtttatacctggtaaccaaacagcagctaattagtagctcttcttccattcttgctccccacagtccatcactctcctcatgcctagtgatgttccttagtaaaaatctaaccatgccaccctctttaaaacccagttgttagggctggtgagatggctcagtagcaaagagcacttgcggctcttggggaggacctgggttcagttcccagcacccacatggcagctcacaatggtctgtctgaaacttgagttccacagtctccaagactctctttaattcttcatgggcatttgatacatttgatgtacataactataggaaggcaaaatgcccagtcatgaaaataataaaaagactttaaaaaaatgaaactcaatgtggcttccgtcttcatagaactaagtcttcaatgttttggacaaactctgaggccttgattattactgtcttgaaacctgtcctgctggcccctgtccctgcaagcctgtctccccaagctacagctccctcacaaggcttctaatctcctagggtgccctctctgcctaccacatcccaatccttcagactctgtcttggtagacatcttgtttgtgaaccctatgctggttttcctggttcgggcaggtccctctggataatccatttgagagtacacatgttctctcctagtgcagctgttaaagcttaatgaaatacttttagatgtttaatcttcatctccctcactgatctttgattctatggaggccacataatcaatacacaatgacagttatcatcatgcttggcacagtgctccattgagtgaacgagtgatgttttctgacttcactgaggagagtagaagagagaggaggggcttgccaatggtatggacaacaggggttgcctgctggaagaacccaggaaggtagaggactactgagcattgtgctaagatattgttgtatagtggtacagatctagtgattgaaaactgctgctttgatactcaatacaaaatatgttcatatataaaagggatagggaagagaccacctgctaacaccctgctactttacaagaaggaggctatcacctctgattctggtaagtacagatctgtaggaagctggcaacaggcattttcaccaagttcttttactggtaggaagtagaggagttgctgaggcaacctactcttttctgatacgtactcctcagggagccagaatttgtgttcagccttgaaatctcttagttagtggtgtcagttcaaagtatcagtggcatggccctgctttctgccagctgggacctgatctctccatggagagagacccttccaggctgctcatcagttattcctatgcaaaggtgaacccatatctcaagaagttaatccacgacagctcactcttgattttcattttattgcatgatttaaatatattcttcttcctcagcccccatctcctcttctctccatgagtgtctgaatacgatgactaaatcccttatggggcaatgaaatttctacttatagacttaacttaggaactgtgcctcagagtttagccactacaatcagtctaatggttctggaaggttctggcgcatcagaaagaaaacagaccatggctccttgcacttggtagatcagcaggttgaggaaagtagacagtgggctgtgaagaaccaataccatcagcactgtgattggttgaatataagcagacaactggctatcaaggtccaaaggtcatttaccctgaagtgacctgattctttgggatcctgactcaccaaatgacaagacactgcaccagatgtcacctcactcagctagaaagtttcttagtggtcagaagtcattgccccaagggcctctctgagagaatataaaacctttgcctatgaggaacagtgccatttgcaatagtggctggtctgctgttctcccacttgggtccactgtagctgagagagaccaggtgctcactagacataaggctgaggggatctgagctcttccaagactgagcctacttaggcatgacaaacctggccctttacttttaaatttagtgtcttgtcttttcttttcttttcttttcttttcttttcttttcttttcttttcttttctctttttatttgatattttctttatttacatttcaaatgttatcccctttcctagtttctcctccaaaacctccctatcccctcccatttctccctgctccccaacccacccactcctgcttcctgaccctggcattcccctatactggggcacagaaccttcacaggaccaaggcctcccattgatgaccaactaggccatcctctgctacatatgcataaatttagtgtcttatgttggggacatcgtcaagcagtggagcactctcagacgcatgtaacgtgatctctctgtcctagttctttgttctgggtcttcatgtttctagtagatgatgttctggtctctgtgcagcaggggagtctatctagttcgcttcttctataaatggacacatgtcttccctggcctcccatcaggagatcatctcagtggcagatgctttagattcaagacacaagacagtagattggagcttttctgtgtcagtattgaagtgttctgtatgaaaaattaacttgttttcacaatataagaagacattgtctgatacaaccttgccaagtatgtctcagaagaaaggtcgagcctagaaataaaaatttgggagcctatgggtggtattttggaggcatgataatgtttgagactgagagagaggtggagaggaggggaagggaagggaggtgtgaagagagagacagtaagtccacactgagtttgggacacactgatacttgagagttgggtgtcttagtcagggtttctgttcctgcacaaacatcatgaccaagaaacaagttggggaggaaagggtttattcagcttacacttccatactgctgttcatcaccaaaggaagtcaggactggaactcacacagggtaagaacttggaggcaggagctaatgcagaggccatggaagaatgctgcttagtggcttgctttccctggcttgcctagcttgctctcttatagaacccaagactaccagcccacagatggtaccacccacaatggacctacccattctttgagaaaatgcctaacagctggatctcatggaggcatttcctcaagggaggctcctttccctgtgataactccagcttgtgtcaagttgacacacaaaaccagccaatactttgggtgaaggagggaaccagaaagagggatagaaatgtaggggtagttttgcagaacccaagaagagggtgtttcatggaagggaaagctcaccggggtgatgccactcaaggatcaggtaaatgagactaagagccttggttagagggctatcagaagctaagagtggtgagtgacatctctctccctgcagcctttggtgtagttgagaggaatgctgtatgcaagccagctgaggaccagaagaaggtgtgtatgcactatacccagagagaagcctctagaacattgatgttcatgaggaaaggagttgatgtgagctgagctcttggttcccaaggggcttgacttgggcagagccctgatgagttagcagcagcactggatcatcaggagggagaagcctggccctgtaacacacaacttaaattgggatcctggctgcttgttgaagtccagagactaacatgacatgaaaggcaactggaaagaccaaaaggtctccatgtaaagggcttgagtgtcacacttagaaatctggaaatgcaaagtccttaaccaaacaaacatgttaaattaatatattaataccatatgtcagaccaacacgctggaatagctccaaaggctagagcaggcctattcttataaacagcatgttccttggtgggcatgactggttggtgccccgtctgtggtctccccaccatggcatcattaataaagctggaaacggctgtgcaaaccgttgcctatgtattttcttctcagtggcaatccgaagcccaggtctcaccctctctggtttacaggtagaactctgagaacaattccccttcagctcagatatgtcagcctccatagacttccctttgctgaggctgccctggagggaggctttaggacagcatctggtttctcctggaagactgacttgtggcttcagctccttttcccaccagctcagctacagcaggacaggtctcctgctctcctgccactgttgtcctagctgagagcgaaacacagacttgcagagcagtgcctcatgggggaaaaaagctcttgtaacatacccactgaaagctctctctgggtttccttcctaaggctgagtctcttttcttaccctccaaattcaaattatctactggaaacagcagggctggagccgccaagattcctgttgttgggccctttgcttattccctaagtaatatgctcatactaagtgcagtatatttttatgtgtttatatgtgtgtgtgctgcgcttctgtgtgtattgcatgtttgagtgctcattttaaagctttgagaaggcacggagcataggactcctaaaataaaatccttctaaagtgtctcacatctctccaaagacctagaaataaactccgcttaaaaaagcacgccgagcagctgctggccttgtttgagatgagctgggctggcagccgcgtgcctgtagctacccacacaaagtgaagaacgcgctttaagttgagtcttgtttcctctgctgttggccctgttcctgtagcaggttggagtcaatgacagaatgacccttgactgtctcttatgagggtgacagaaaagaccacagtataaaagatgcagggccttcaccaagctggctgtgctcttgaaagtgatggtgttggagtaatggcattgttggtgcaatgccatgataagaaaacattcttgccctgtgaggggaaggtgaaggataaggcatatatgtcatgagacttactcatcagtatacaggagcacagaaaagcagcaatggaagtcactgcttcttgtctcctctgagggtgacacctgtgctgtgtatactatggtttctacttctgcacagagagcctgtactgtggttcagtcagaggaagactagcagggtggactcacatatcttatttgtgtcggaggttggagggtagagttgtcattctgagggacaagatacctggggctgttgtagctcccagctttgattacagatgagacaagatggacactgactggggttctttcaaagtgttatacttaataattgcttcagcccttctaggtcggttcatactcgaggttcacagttgaggggactggagacagggaaaggcaagtatttagctctactctgtggaagttgaatgcagttctatgtgatctcctcggagcatcctaaatttcagacacaaatgatattcctggataagtccctcctaccccatatgaagcacatgaccatctgctctgcgtgtcttggctgcttgtgcacattaagtgactaagtgacattccagctcttgaacaagttataaagtatgtgtgtgatgtgatgtgtgtgtaagtgatgtgtgtgagccatgtatgtgatgtgtgtgtgatgtgtgtgttgtgtgtgatgtctctctctctctctctctctctctctctctctctctgtgtgtatgtgtgtgtgtgtgtgagagagagagagagagagagagagagagagagagagaggtgtatttctgaatgtatttactcatgcacatatgagtgtatgtgcatgtggattctagaggaccatgctgggtatatgccttagtttttgagacagagtctctccctgaaccaggagctcaccagtttggcaaggctggcttgctgtcaggctcaaccccctgccctatcactgctttcccagtgcagaggtcacaggcaatgctgtgcccagcctcttacataggttctggggatctaaacttagaatgtttcactcgcatgacaagcgcttgaccctcaaagctctctctcaaggctccaaaacttgaactttaattgtaggcccacacagttgtggatgagataactaatctgaaagatcaatctaagtgaattggggctcacagaggcagatagtcacatgtaacttaaggatggagatgtagatattttataatgatgtgaactttatagtgtgaacttgtacaaactgaatggctgtcatatcaccaggagacagactcttagggaaccaccatgatgtctgctggctctacttgacaagaggtgttgttcagtgagggtgtgatatcacagatgtcacacccccaactcccacatccattccctaacagtaactttgaattctcttagttttcccgtttttacacccattttaaaaaaatctatactaactcattcgttacctttgacctatagaggcagtgggtttctgggtgagatgtatttccctgtctctcagtgtgtttacattgttaccagtggagtctgccaggatggaaacattgttggcctgctccccacctcagcttgtatcctctttgctggactgaccaggttgccatcactacttctttccagactctcctgttggagtgcaaactccctcagatggaaatccccatggtcagatggtcagctgacttctgatggcccttcctgaagctcttatctcctctttctgtgggtaccactgccctttagacctgctgtctgtcagatgtctgatcttcctgtctccttgctacatcctgttcctgttgcccagggacagcttgccactgtactccagctgtactccacacacaccctactgggtgatttgctgggacacaccctttagtatctttcttagagaagaatgctgggaaatacattcaagagaccttttgtgtctttaaaactgtcttcttttacctcacacagttggtatctgatatggggttttgttgcaatttctctggcagttgttgaagttctgtgtcttgtgtcttttacctttgctgttgggaaatgacacttctgttcttgtttctttgtatccactgttttctttctagatactttgatgcacatttttttttctgttctcaaatttcatagcacctataacttcctcggtttagagtttctcaggtacagtttatctgggcgggggtgggggagagggtgtttgctggatagttttatgtcatcttgacacaagctaaaattatctgaaagagggaacattatttaagaaaatgcctccataagataggatcataaacaggccagtagggcattttcataattagtgattgatggggtagggctcagcccattgtgggtggtaccattcttgggctggtggtcctgggttctataagaaaggaggttgagcaagccatggagagcaatcctgtaagcaggctccctcatagcctctttatcagcccctgtccccaggttcctgacctgtttgttgagttcctatccccatatccttcagtgatgaatagtaatatgaaagcataagctggacaaaccctttcctccccaacttgctttttggtcatagtgttttgttgcaggaatagagagaccctaaagcaggtgaccttcattgtgtgggcttggaagaggagggcaccgtgctcactgcccagatcttttacaagctccctgttttcttctgtggagcatgtcctgtctgtgccacctcctgtcctgtgtataaatgtttttcttctcttggggaactaatatttgggtattttggctatatggactcctcatcttctgtcttataacactggcttgacttttcttacctgcttccttatctaaggctcggtacccttttcagatgtgtgctatcagttacacaaggtttgtgaaggagcacagatatctaaccagcaaatcgtagagggttttttttcgtgaggtcactgatggaacatttcagaatgcgttacctctccccactttcaaatttttaaaggtcaaggtttcttaagaggcagaccttcctctaagctgctgtttttggttgaacaggatactgttgaagccattcttgccatatcctaggctatttagtagtcctgagggatttcagtgtagcctggagagggaggcgccatgactgtgagcagctgtaacttgggcatgatggtcatcagacttccagcctctcccccatgggtcttgattgtttatgctcaagggaggtggccagagtatagggtcactgagtggaaagactagaattccctttcccacccccttttcctagcttataattcatgaacttaagctctgtaaagaaacgcagaatcaagtctgagatgccctgttcaccttcttcccatgatgcagctggtgtgcaggtattcatgggttatggagcctgtaacagttgtggacttcttttacttcttagtgataagcttggaaaataattctttgggaatgcagagatgtgtgttatttctgtatgttcatacatggtcagtgtggaatgggtgtgtggtctccatggtctgtatggagtaggtatgttggcatgcagggtctgtgtggagtgggtgtgttggcatgcagggtctgtgtggagtgggtgtgttggcttgcatgctctgtttggaatgggtgtgttggcatgcagggtctgtatggaatgggtgnnnnnnnnnnnnnnnnnnnnnnnnnnnnnnnnnnnnnnnnnnnnnnnnnnnnnnnnnnnnnnnnnnnnnnnnnnnnnnnnnnnnnnnnnnnnnnnnnnnnnnnnnnnnnnnnnnnnnnnnnnnnnnnnnnnnnnnnnnnnnnnnnnnnnnnnnnnnnnnnnnnnnnnnnnnnnnnnnnnnnnnnnnnnnnnnnnnnnnnnnnnnnnnnnnnnnnnnnnnnnnnnnnnnnnnnnnnnnnnnnnnnnnnnnnnnnnnnnnnnnnnnnnnnnnnnnnnnnnnnnnnnnnnnnnnnnnnnnnnnnnnnnnnnnnnnnnnnnnnnnnnnnnnnnnnnnnnnnnnnnnnnnnnnnnnnnnnnnnnnnnnnnnnnnnnnnnnnnnnnnnnnnnnnnnnnnnnnnnnnnnnnnnnnnnnnactctctctcggttatatctggcccactgtcttgtctgttcttggatggcctgcagctaaaactgttcccaccaagtgcccccctgcctctgccataaaatatagatatccatgcttagatatttatttatattaagccctctaatctattgcactgacctagctgattatctgtattttaaattccagggttttataacatactgtttcctgatagccaaggatcttattcctcttctgattcttttccagaatttatttgactgtttgtttacatattgatacccacctctctctctctctctctctctctctctctctctctctctctctctgtgtgtgtgtgtgtgtgtgcatgtgttcaagtgcatgcacgcacactaccatgcacatgtaaacattggaagataacttcacatccttgcctttcagcttgagacaggctctatcttgtttaatgctacataggccaggctagctaacccatgagtgttgcacagttctctagctctggcagggtacagtgagatcgcagacatttgggttgctgtgtagcttctatatggcttacagggatttgaaccctggttgttagacttgctggcacacactttgcccatagagccatctcccctagcgatatatgaaccttacaggtgactttggaactgacactccctagaactcctggtagggtttctaccgcaaagaattgggtcttctttgaattgcaccccagtcccagtcctttacattgccatatcttgtttgtgccactgaaacaaaatttctgagtacaagtaatttataaacaacagaaatctgggctcacatgtggctcggtgggtaaagtacctgctgtatgaatatgaagacctgagtttagagcctcagataccacacacagccggatgagctcatgagtatctaatctcagagctcccgtatccagatgttaggcagaggcaggagactcctcagatgatctgtgtgttaagttgatgtcttgctgaaatcaatgtgtgagtttgtttctctttttttttattggttattttatttgtttacatttcaaatgttgtcccccttcctggtttcccctctacaagcctcctatcccatgtccctccccctgcctctatgagggtgctccacccacccactcctacctcactgccctagcatctccctacactggggcatcaagtctccacaggactaagggctttccttcccattgatgctagataaggccttcctctgctacatatgcagctggagccatgggtccctccatgtgtagtactctttggttggtggtttagtccctgggagctctggggagtctggttagttgatgttgttgttcttccaatggggttgcaatctccttcagctcctttggtccttcccctagtccctgggagctctggggagtctggttagttgatattgttgttcttccaaagggattgaaatctccttcatctcctttggtccttccttgagggtcactgtgctcagtctgatgattggctgtgagcatccgaatctgtattggccaggctctggcagagcctctcagggcagagctataccaggctcctgtcagcaagcatttcttggcatcagccatactgtctgggtttggtgtctgcagatgggatgaatccctaggtgggacagtctctggatggcctttccttcagtctctgttctactcttagtccctgtattttctttggataggaacaattctgggttaaaatttttgagatgggtgggcggccccatccctcaactaggggctgtgcctatccactggatattgtctctacaggttctatctcccatgttgggtatttcagctaatgtcatccccattaggtcttgggaacctcttgcttccctggcatctgagactttgtagtggctacccccagttccccatcccccactgcgacacacttccactcaatttcctgatcctctgaacttctcctctgtctcctcccacaccagatcctgcccctcctttaccttcccaatccctccttccctctaattcccgtgatattttgtccccccttctaagtaagactgaagcatccacactttggccttccttcttgagcttcatatggtctgtgagttgtattgtgggaattccaagcttttgggctaatatccacttatcagtgaagtgcataccatctgtgttcttctgtgactcagttacctcactcaggatattttctagttccatccatttgcctgtgaatttcatgaaatcattgtttttaatagctatgtactactccattgtgtaaatgtaccacattttctgtatctattcctcatttgaggaacaactgggttgtttccagtttctggctattataaacaagcctgctataagcatagtggagcatgtgtccttgttatatgttggggcatcttttggatatatgcccaggagtagtataactggatcctcaggtagaactatttccaattttctgaggaactactgggctgtttttcagagtggttgtaccagcttgcaatcccaccaacaatggaggagtgttcctttttctccacatcctcaccagcatctgctgtcacctgaatttttgatcattgccattctgattggtgcgaggtggaatctcagggttgttttaatttgcatttctctgatgactaaggatgttgaacatttctttaagtgattctcagccattcaagattcttcagattcttaaattccttgagaattcttttttttaatttaatcttatttgtaattcactttttacactccatattccattcccagcccctgcatccacccttcaactgctccacatcccacacctcttccccaccctgtctctacataaatgcccccattccccaccctacctgatcttcaaactctctggggcctccagcctcttgacggttaggagggtcatctctgaatgaacacagacctggaagtcctctactgtatgtgtgttgggggcctcatatcagctggtgtatgctgtctgtttggtggtcgagtgtttgagagatcttgggggtccagattaattgagactgctggtcctcctgcaggatcgctcttctcctcaggttctttcagccttccctaactcaacaacaggggccagctgcttctgtccattgattgggtgcaaatttctgcatccgactctttcagctgcttattgggtctttcgaagggcagtcatgatagatccctttttgtgagcactccatagcctcaataatagtgtcaggccttgggacctctccttgacctggatcccactttgggcctgtcactggaccttctatacctcatgctcctctccatttccatccctgcagtttttcagacaggaacaattatgggtcagaggtgtgactgtggaatggcaaccccatccctcacttgatgtcctgtcttcctgatggaggtgggctctataagttccctcttcctactgtagggcatttcatctaaggtccctccctgtgagtcctgaaagtctctcacttcccaggactctggtgcattctggggggtccccccaacctcctatttcctgaggttgcctgtttacattctttctgctggccctgagggcttcagtccttttccctcacccaatgccagattaggttcccatacccccccattgccccaccccccccaccccatctactttccctcccaagtccctccctccatcccactttgattgctttcttctttctcccaagaggaactgagtcgtcctcacttgggcacttcagcttgttgagccttttgaattttgtggactgtatcttgtgcattctgtatgtttcttccttccttccttccttccttccttccttccttccttccttccttccttccttttttttttttgctaatatccacttattagtgagtacataccatgcacatctttttgggtctgagttacctcactcaggatgatattttctagttacatccatttgcctgcaaaagtcaggatgtcctcattcttaatagctgggtagtattccattgtgtacatgaaccacattttctgtatgcattcttttgtcctgggacatctaggttgtttccagcttctggctatcacaaataaggctgttatgaacatagtggagcatttgttttttgtttagctctgtgtccctttttaaatagggttatttggttctctggagtctaacttcttgagttctctgtatatattggatagccttctattggatgtagggttggtaaagaccttttcccaatttgtaggttgctttttttgtcctgttgacagtgtcctttgccttacagaagcttttcaatgttatgaaatcccatttgtcaatagttgatcttagaacaagagccattgatgttctgttcaggaaatttcccctgtgaccatgtctttgaggatcttccccagattgtcttttattagattcagtgaatctggttttatgtggaggtccttgacgcacttggacttgagctttgtacaaggagataagtatggatcaatttgcattcttctatatgcagaccaccagttgaacaagcaccatttgttgaaagtgctgttttccactggatagttttggcttctttgacaaagatcaggtatccgtaggtgtgtgggcttatttctgggtcttcaatactattcaattgatctacctgtctgtctctgtaccaaaaccatgtattttgttgttgttgtttttaatcatggtttctctgtagtacagcttgaggtcagggatggtgattccccaaaaagttctcttagagttgagaatagtttttactgtcctgggtttttattattccagatgaatttgagaattgctccttctatctctgtgaagaattgagctggaattttgatggagattgcattgaatctgtagattgcttttgataagatggctatttttactatgttaattctgccaatccatgagcatgggagctctttccatcttttgaggtcttctctgatttctttcttcagcgacttgaagttcttgtcatacacttgcttggttagagtcacacaaagatattttatattatttgtggctattgtgaagggtgtcagttccctaatttctttgtcagcctgtttatcctttgagtaaaggaaggctactgatttgggttaattttgtatccagctacttttttgaagttgtttatcagctataggagttctctggtggaatttttgggatcagttaaatatactatcatcgttcccaaatagtgatatcttgacttcttcctttccaatttgtattctttttttaattaggtattttcctcatttacattttcaatgctatcccaaaagtcccctataccctcccctacactcccctacccacccactcccactttttggctttggcgttcccctgtactggggcatataaagtttgcaagtccaatgggcctctctttccagtgatggccgactaggccatcttttgatacatatgcagctagagtcaagagctccggggtactggttagttcataatgtcgttccacctatagggttgcagatccctttagctccttgggtattttctctagctcctccattgggggccctgtgatccatccaatagctgactgtgagcatccacttatgtgtttgctaggccccggcgtagtctcactagagacagctacatcagggtcctatcagcaaaatcttgctagtgtatgcaatggtgtcagcttttggaggctgaatatgggatggatccctggatatggcagtctctagatggtccatccttttgtctcagctccaaactgtgtctctgtaactccttccatgggtgttttgttcccaattctaagaaggggcaaagtgtccacactttggtcttcgttcttcttcagtttcatgtgttttgcaaattgtaacttatatcttgggtattctaagtttctgggctaatatcaacttatcagtgagtacatatcatttgagttcttttgtgattgggtaatcactcaggataatgccctccaggtccaaccatttgccgaggaatttcataaagtcattctttttaatagctgagtagtattccattgtgtaaatgtaccacattttttgtgtccattcctctgttgaggggcatctgggttctttccagcttctggctactataaagaaggctgctgtgaacaagagatctcagaagatggaaagatctcccatgctcatggattggcaggatcaacattgtaaaaatgtctatcttgccaaaagcaatctacagattcaatgcaatccccatcaaaattccaactcaattcttcaacgaattagaaagaacaatctgcaaattcatctggaataacaaaatacctaggatagcaaaaactcttctcaaggataaaagaacctctggtggaatcaccaatttgtattcttttgacctccttttgttgtctaattgctctagttagaactttgagtactgtcttagtcagggtctctattcctgcacaaacatcatgaccaagaagcaagctggggaggaaagggtttattcggcttacacttccatgctgctgttcatcaccaaaggaagtcaggactggaactcaggcaggtcaggaagcaggagctgatgcagaggccatggagggatgttccttactagcttgcctcccctgacttgctcagcctgctctcttatagaacccaagactaccagcccagagatggtcccacccacaaggggcctttcccccttgatcactaattgagaaaatgccttagagttggatctcatggaggcatttcctcaactgaagctcctttctctgtgataaccccagctgtgtcaagttgacacaaaactagccagtacaagtactatatttaatagatagggagagagtgggcagccttgtctagtccctgattttagtgggattgcttcaagtttctctccatttagtttttgttgactattggtttgctgtatattgcttttcttatgtttagatatgggccttgagttactgatctttccaagacttttaacatgaaggggtgttgtattttgtcaaaggctttttcagcatctaatgagatgatcatgtggttttatttctttgagtttgtttatatagtggattacattgatggatttccatatattatccctgcatccctgggatgaagcttacttgatcattgtgaatgatcattgtgaatgatcattatgatgtgttcttggattcagtttgcaagaattttattgagtatttttgcatcaatattcgtaagtgaaattggtctgaagttctctttcgttgttgggtctttgtgtggttttggtattagcataactgtggcttcatagaacaaattaggtagtgttctttttgtttctattttgtggaatagtttgaaaagtattggtatcaggtcatctttgaaggtctgatagaattctgcactaaaatcatctggtcctgggctcttttggttgggagacttttaatgactgcttctatttccttagaggttatgggactgtttagatgacttatctgatccagactaaactttggtacctggtatctgtctagaaaatcatccatttcatctagatttcccagttttgttgagtattgccttttatagtaggatgtggtgatttttttttggatttcttcagtttctgttgttatgttttcctttccatttctgattttgttaatttgggtactgtctctgtgtcctccggctagtctggctaagggtttgttgatctgattttctcagagaaacagctcctggttttgttgattctttgtatggttagttctctttgcttctacttggttgatttcagctctgagtttgataatttccttctatctactcctcttgggtatatttgctgtttttttgttttttgtgctgttaaacttcaagtgtatgctctctccaatttctttatggacgtactcagcactatgagttttcctctttgcattgctttcatcatgtcccataagtttatataatttgtgccttcattttagttaaattctaaaaagtctttaatttctttcttaatttcttctctgaccaagttatcattgagtagaaagttgttcagcttccatgtatgtgtgggctttctgttgtttttgttgttattgaaaaccagccttaatctgtggtgatctgttaggatgcatgggattatttcaatcttcttgtattggttgaggcttgttttgtgtcagattatatggtcagtttggagaaggttccatgaactgctgagaagaaggtacattcttttgttttagggtgaaatgttctgtatatatctgttaaatccatttgattcataagttctgttagtttggctgtgtctctgtttattttctgtttccaggatctgactatttgtgagagtggggtgttgaagtctcctactattattgggtgagattcaatgtgtgctttgagctttagtaatgtttcttttacaaatgtgtttgcccttgcatttggggcatagatattcagaattgagagttcaccttggtagatttttttctttgatgagtatggtatccttccttatttttgataacttttggttgaaagtccattttatttgatattagaatcgcaacaccaacttgtttcttgggaccatttgcttggaaagttttttccagccttttactctgaggtagtgtctgtctttgtcactgaggtgtgtttcctgtatgcagcaaaatgctgggtcctatttatgtaaccattctgttagtctatgtcttcgtattggagaattgagcctatttatgttgagagattaagaccaatggctgatacttcctgttatttttgttgttagaggtggaattgtgtttgtgtggctctcttcttttgggcttgttgtgagaagattaatctcttgctttttcttggttatagtttccgtccttgtggtagcgtcttccatctattaccctttgttcagctggatttgtgtaaagatattgtttaaatttggttttgtcatagaatatcttggtttctccatgtatagtaattgatagttttgctgggtatagtagcctgggctggcatttttgttctcttagggtctgtatgacatctgtccaagatcttctggcttttaaagtctctgttgagaagtctggtgtaattctgatagatctgcctttatatgttacttgaccttttccccttaccacttttaatattccatctttgttctgtgcatttggtgttttgattattatgtgacaggaggaatttcttttatggtctcatctatttggcattctgtaggcttcttgtatgtttgtggtcatctctttctttagcttagggaagttttcttctataattttgttgaagatgtttattgacactttaagttgggaatctttattttcttcaatatctgttattcttaggtttgatcttttcattgtgtcctggattttctggatgttttgggataggagctttttgcattttgcattttctttgactgttgtgtgaatgttttctatggtatcttctgcacctgagattatctcttctatctcttgtattctgttggtgatgtttgcatctatgactcctcatctctttcccaggttttccatctccaaggttgtctccctttgggatttctttgtttttatttccatttttagatcctggatgattttgttcatttccttcacctgtttcattgtgttttcctgtatttctttaagggttttatgtgtttcctctttaaggacttctctttgttcacctgagttctcctgtatttttttaagggagttatttatgaccttctcaaagccctctatcatcttgagatgggattttagatccaaatcttgcttttcaggtgtcttgggggtatccagagcttgctgtgtgtgtgtgtgtgtgtttgtatggtggtggtggtgggagaactgggttctgatagtgccaagtaacattggtttctgtttcttatattcttgaggttgcctcttgccttctggttatctctggtgttagctgtccttgctgtctctgactggagcctgtccttcctgtgagcctgtggtcctggttgtgtctaaattcccggaggacctggtttcctctgtgatcctttgatcttggatgtgttagaagtcctgtgaccctggatctgttgaaggtcctggaggacaagttgcctctgggtgtgggtgggctggggcgggtggaacaccagagtttgtttcttttggttcctctagaagtgtaaccatgtcatccacatgtcccacagctctgttcttgacagcagttataacacagcacatataattgtcttactgtattgatgaggccatttagtgcagtttgggctaacaaggatggaaaacttcctttttctcttgagggtaggtgggctgctgctgcatctggggctgttggtagaccacattcttctgttgttttttttttttttctagcctcctaggactttatattgcacatgactatttttgcttgatgctgtgttagcatctatcgagtgaccacagaattatccctctttaattatttaatgctatgagtaacatgggttttctggtttctctaatattgaatcatatttccattccagcatagactttccaaaattgagtgtcttagttagggtttctgttactgcgatgagacaccgtgaccaaaaggaaagtcagggagaaagggtttatttggcttacacttctatattgctattcatcatcaaagaaagtcagcacgggatctcaagcggtgcaggatccttatgcagaagatgatgcagaggccatgaaggggtgctgcttgaccagggattgcatcacccacaataggctgggccctctaccatcaatcactaattaagtatgtgccctacatctggatcataatgaggcattttttctcaattataagttacatcctttcagataactctagtttgtataaagttgacatcagactagccagcacaactgaccccttgacatacaaacatatcacgatttaagccacaatctttcctttctcatttaatgtgagattaaatgctttgcatgtctccttcataccttcaaaaccagtgccaccttggtgatttttacactattgagttcaacttccagtgcaaggtacagcctaagcctgcctctggaacacagcttctggctgtgactctcaagaaacacttcccaaaagacttcaccccaacgatcctggtatcatcttaatcattgctaatttctcagctccaatctaccagaattgagtattctagcaaagcaaagatttcactttagtagttctgatatcttgttaatcacagccaatcttcagcctcatctaaccaaaagaacagaatcttaaatcagaatagcaaacagccctcatagagtctttaaactccctctgaaacttcacaagccaggcctctgaactttgcactgttctcaacattcttatctctaatctcccacagaacataccactgagctttcaacattcagtaggttttctagcccaagatttaaaagtccctctgcaaccctcctaagatcatggccaggtctgtcacagcaatatcccataatcttggtaccaacttgtctttctattgttgtttgtgactaaaaatcaagtttgggaggaaagtgtctatttgacttatacttccatacctctgtttgtctttgaaagaagtcatgacaggaactcacagagggcagaaacctggaagcaggagctgatgcagaagctatggaggggcgctgcttactggatttctctccatggcttgctcagcctagtttcttatagaacaaaggactaccagcccagggatggcaccatccacaaaggactgggccctcttccttcaatcactaattgagaagataccttacagctggatcttatggaggcatcttctcaattgacgtttcctcctctcagataactctagtttgtatatcaggttaacacaagactagccagcacattgaatatatttttaaattgctcttatttttattcacagtcccttgctttgtaatttttagggaagtgtgttagcttctggttttgtttttaaatttatttattttatgtgtatgtctgtgtgcctacgtaagttttgtatgtatagtaggtgtacgggaacaccaggaagccagaggaggttgtcagatcctctgaaactggagttacaagtggttctgtaccacctgacgtgggtgctaggaactgaacctagctcggtgctcttagccactgagccacctcttcagccccgtttctttttatgacttagatatcagggctatgctaatgttatggaatagttttcgttttttaaaaatagtttctgtgaaatgaaaatcaccttccccttgaccactgggttgaacttgtgcatcaaggctgcctgtgcaaactttctcagctttgcctgattacagctttagagtttctacagctttggctgttgctatgcttccttagagacgttttctcagtgtttctagattttgtatttgaaatttcaggtcatttatttttcaagatatttactgtttccattgagagcttcagtcacattgccattaaggcagcagagtccttaaagtccctgtcatcttcctctcatgtttatgtttttggtttttgttagtttttgccttagtttcctgattataactgctgaaacctattcattttattattactgaaataaaggctttggctttgaatgcaactttagattttgatggtgtgttaatttttgccatgtcttcataatgcacccatgatcttgtaaaatgaatgtcgctgccagcccctaactgagtgcaggttcagtgtgttcatggcccacatgtgcttgaaaatcacatgcagtctcttctgtgtatctgtctgatagagaaggcctgttaattcttctcactgtgataagataaatgcatagtataacttactattttcatcactgttaagcataaaatccagtggtgtcaggttcatttacactgtcatctcaccataacatcatgaatttccagagatttctatgagctcactatgtccccattaagcagtccctggtagccactgttctgcatcctgtgtgacttcagctattctgagtgtctcattcagccagagtcagataatgtgtgtctccttgtgtctgaaatattccatttagcttgctgttcctaaggttcatctgtgttgtagtgtgtatcagaatttcctttttaatgctgagtaatatacttcactatatttatataaattttatccattcactaatctacttattagtactttactatatttatatacattttattcattcactaatctactgataggcatctgaatggtttcatggtttattcttttttctttctaagatctttgtgtgtttatatgtgcatgccagtgtatgatgtgtgtatgcatatatgtttatgcatgagcgtggtacatatgtgccacagtgcatgaatagaagtcagaggataaactcaggtctcaggctttgctttttaccttgcttgagacagaactcttgtttgctactatgtttgacaggctgatttcttgctaacatttggggcttctcctgattctgcctcttgtttgtcatgggagcagcaggactacagaggcatgggcttctacataggttcaggatctgaactctgtagagtgactctttacaccctggacactctccctgcctagaatttgggtcacatctgtcatttgctcatgtgaatgaactgctatgaacatgggtgtgtaagtacctgagtcactgctctccctagcacgcactctcaacgcatttctcatgagtgtagtagaactgagtttgcagttggacatgatagtgttctgttcattttttaagatccattgggcattttacatagtttctctagcattctgtgttctaaccagccttggccacactgagtgtgtgtgtgtgtgtgtgtgtgtgtgtgtgtgtcatgaacagggcctgcaggtatctggcatctgtgtggatggaggacagcgaactttgtgtgttacttctcatcttccatgtcacgtgagaacagggtcctttccttgtttaccaccatgtacatctgtgagtttctggggacttgtttgtttgtttttgtttcgttttgttttgtctgtctccatctcctgtctcactgtgggggtgctgaaattacagagactccagtggacccagatttacatggttccgggaattcaaactcatggcatcagggttacatggcaggtgcttcatccactgagccatatcttcagtcctttctttgtcctcctcctcctctttcatcctcctcctcctccccctcccctcttcctattcctcctccccatccttctcctcctcctgcttctttgaagtaggcattgtaggagaggtggatcagtatcttctggggttgttaacactgagcgggaatcatctgacccctgggcatttgtatttattgtctgaatgaatgccaatcaagttcttcctatttctcaggggtttttggattttgttgttgttgaattgtagtagttctttacatattctgaacattaacccctcactgacacatgattgtgggtattttctattgttgggttgccttttccctgtcaattgcatcctgtaatacaagacacttgaaatttctgcaatttttcagctcctttttccttacattgttatgatttttggtaaattccaattgagttttaaatttttcatgtgactgcaagccaaatgcttttgcttttgaaaccgacacctggtgaatattatggtttggatctgaaacgtccctcaaaggctgtgcattggaagcttgtcccactgcaacctgtaagaagccacggaaaatcccgtgctaggcgcttgttacccactgttttctatgaggagttttacaatgttagtcctcatctttagatatttgatttattttgaatggatttctaatacagtataagggccagttttattgttttgggtgaacacacagacaggcattgtatcttcatggggtgctctgagcccccaagatgaccatgctgtaaccccacagatcggtttctatcagactttctattttgttccatctgttcacatgccaacttctaggccactgtgtgtgccctgggtcacactctatcataggccggtctctggccactcccacagctttggctggtgtgactttgtagcaagttttgaaatcagggaatgtggatcctccaactctgctcttgttttccagtgctcttctggttattcagggttctttaagattaaaaatggatttaggatgggactattcctgcaaagaatgtgttgggacttagatgggatctgcattaagtctgtatgtaactataatattgttactcagaaactataatattgttactcatacatacaggcagaacactgatatacttaaataaaaataagtccatcttttaaaaaaagcattattaaatttcccattgtgatatacactagagcttctgaatttgttcttgctgtctaactgaaatcttgaggctacaaacatggctgcctctctattacttacgtcttcttgaagccatgtttcagtttcagtgtgtaagaattttgttttcttggctaggtttcatcttaaatatttaattcttttttttgtgctgttataaattttcttagtttcttttaaaaatgtatttgtgtacgagttcatgctctctactgtacacttgtagagtcaggcaaccttgggtgttgattcttgccttcagtagtttcagacagggcatcccattgcttgctgctgtgtacaccaagctggctggtctgcaggctcccagggattctcccttctctccctccctcccatctggcctaggagcattgggagatgtgtgctgctgtgtccagccttctgtgggacccaggaatccaaatctaagtccttatgcatgcacagcaagtactttaaccactgagccacatccccagctccctagctttaaaaaaaaaagtgtttatagtatataaaaaacaaccattttcttgcatattgattttgcaatcctaaaattttgctcaatttttcatttcttccagtgagttcttttgctttttcccaaaacctgcattcttgtgttacgaacagaaatcatttaacttcttccattccaaatttaggtgtggaaaaaatacttatatatttttttaaaatgagaagataaaaaattcatatatttaccatgtaaagcacatttttaactgctgatatgttatggagtggttgagtgggttcataggggcataatcttatgaggttattttctctagtgaggacactcagaatctgctttctatacagttttcaagaatacagaatgctggagctggagagacagcacactggttaagagcactggctgctcttgcagaggatctaggttcagttcccagcatccacacgacagcttacaaatgtccataattccagttccaggggatctaatgctcttttctggactccatgagtaccaggaatatatgtgtttcacagacagacagacagaacacctatatacttaaataaaactaagtacatcttaaaaaaataataatatgcattattaaatttcccatcgtgatatgcagtggagcttctgaattcattcttgccatttaactgcaatcttgtgtttgttcctggacccagccacaggacctgttaatttttatcaaagtagcctctgttctttgatctgtcactttctggaaagatttgctgactctctggtgtacctgagcctcagagtacctgagtctctggaataacagagtccccaggggtacctaagccccctaaaactgagcccctcagggtatttgagccccacttcccagaaaccaagctctccctggggtacctgagaccctttagaatttcagtgtatcaaccatgcatttctgcttctggaatcaatacttggtgcctttcttgggctgcagcaagaatgttccccaaaggcttggttcccatggcagcagtgttcctagaggtgcagctttggggatatgattggatcacagcacctcaaacctcatcgatagattaatccactgatagtagataacatggtaggctgatcggaagtgacagacttactggaagggagtcaattcttgggaaatgtccttgggggctgtgtcatatctcctgcctcacacccctccccattcttcctggctaccatagggaagcagcctcccccctcactctcacagcagttatagtctgcctttctctggcccaaagcagtggattaaacaaggagtgactttaaactgtccttattttaagttgttcctctcaagtacattgccacagtgagggagaactgacacatacaggccactgacacacacaggccactgacacacacaggccactgacacaggtctctgacacaggccactgacatacatggactgctgacacatgcaagctgctgacctacacaggccactggcacacatgggccactgacacaggccatgtggagagaacccttcctgtatgagatgtgtgtgcagaagtatgctctgggttggggaatagaagcagtgtttgagctgtaggtgtttctgggagcacgttcagagctcagcagcaaactaggaaatgaaactgaagggagcaggtactttctaattttaattaaaaaccttaattagcatacaaaatatgactatgttctttatgatgttccatatacttgaaggttggagtcattgctttctgaatatttcatatattcattttgcttgggcacaggaagggactgaacagtaaggactcacgtgtgagctcatgggtgcccacctgtccccactgatgtccactgttgcctcccccaccgctgctgctcccatcccccacatgctcaagttgacattgtcattagaaaatgaaaatctgtgatttcatggggaaccatgtccagctgctcaatcccaccccgtttccattcttagcttctcccctatttaaaaatcaacagcatcaggtcacacttgccaagcctttgtcacagtctccagcagctattcctcctgccatctgctcccccagatgctcagctgcccccaatctcagttcctctatggacagtcaaggggccgagctcagcagccttcagctctacagcaccagctgcccccatcccacacatgtgacctcactataacacatgctgcagcctgaacccctggtaccggcttgctggcccagccagtcttgcaatttctagaaactggatgttggctggaagagacaggagtgtttctatggagatgtgaagcaacatctcatagtaagaagcacaaactagtttgacagaagttggttgagctctgagattcagttggtttcaagttagtcctcaccttggaagtatgtgtgttaaagaagctttggttgctgctgtcacgttcccacctttggtctaaaacagtgttctcagatggttgagcaaaggcctacctgaggcctgagattcctggtgttctgagacactcatgtaatcagggcaggtcccatgtcttctctgaacctagtaggttatactcacaaggaaaggaaactcccacagcctacttctctgccatgtttgtgacattggcatgcggacagagtggttcttgctaacgtgctctatcttccttccatgccatcctctgagtttcagacatgtgtggtgaggaggcttggatccagtggccttgctcatcagcagctggaggcacaggggcttttctcattctcaggactggtggggtagtcactgaaggaaactaacaacttttcaaacatgtcctggggacagcaccactcccaaatatttgctcccagcataaagcataatggagagtcacagccctttctgtctctgggaataggccaaaccacaccagaactcttttctcatcctgataaattcatgttaatgaaattaaaattctgtttgtcagtcacactgttgatatctgatcaggttggcaactggactttcattgttatgttttatggctcctttactttacactgatattcttctggtctcgtttactattcttcgacaagagttctcttctccagggtgtttttaagcatatgaagcaggagggtggatgactgcggtgcatatgtgcttacatcctagatacaatagacacaggggtgactgccatcataggatgtcaaagagcacaaaggaaataaagggtttataataaggatttataacattctgcttattgatattgctgtgtggagcaagggaatataccctgctattcactcttgggaacatctaagaatggtataattaaaaaaataaaacagagggcctggagagatggctcagcagttaagagcactgactgctcttctagaggttctgagttcaattcccagtaaccacatggtggctcataaccatctgtaatcagatctgattccctcttctggtatgtctgaagacagctaaagtgttctcatataaataaaataaatacgtcttaaaaaaaaataagccagtggctgagacccccaatgtcaacctatctccatgaacagtaaccctcattatctacagttttgattccacagtttaattacttgaagtcagctgtgctctgagagtactacctggaaagttctagcaataaccaatgtataagttgttgaggctccaagtaacctggagaactcttgagctctagcccacttctatctttcctgaaatgtgacccttctctctttccagtgtgtccacattgtacgaactactcacccacttgtgactctgtatccctcttagttattagcctgactattggattttgtgttcaagtagtccttatataataggtggagcaacgtcttagtgttcaaacagtcctcaggggtaaaccaggtccaattctttacactcccttgtccctcctttttgcttaccctaccctacccatgcccactccagccaccacagctccctatttcacatgggcactcagcttagcctcctactctgcctggccttcctgtttagggtacatgacagccagctgagcaagcccatgggagcctagtcattcaacatgttctctgttggtttttaaatgattttagtcgactctaataaaataagagcctccttgagcttcaccagtctttgtaccctgactgggggttacactgataaaggaaaaatgggatggtctttcaactccctcctagagtgtcaggttcagggtggaggacagactgactaggtttcgctcactgggtcctgggaagacaaatttgtcacagcagcctctgtacctacagggaattatttggacacattcatacctattcagatagctcacgctttcttgatttattattctgagttcttcatgttcgtttcctggcctcctccccagccacctccccagttgttactagctgagtcagtactgcctacagaacatcttcttctgctttcaaatgcaaaccacagtggacaggcattctccggagtgggtagctgggtaatgagcatgtccttctctgccttgtgtgacagcatccatgattctgctcatggcctcttggggcagctagagtgacagcctcatcttgtctgagacgtgtgggctggagagctttccaggccacatccagacagccagctctgtcactgtcccccatatggcttattcatgcagaggccacacagatgtatggtggccataaaagcccctgtaagctggtgtgggaagaggaagcagtgtcagggagctgcccctccacatcagatctgtgcttcggaaacagccctggagcccatcgtccaggaatggacctgggtgggaattgatttctctagactgaggggtccctgactaagttatagtcacatcaagtcaccacagccaaaccctgctgagattcaccctccggactggtctctgcctgtgtgactcacccaggctgctgccatggagtctgaaatcacagcacagctgaagctgaagctggtggcctcagagaaccgttaggaaatatctccgacctttctattgctccccttcctgtacctgtagactccactgaagcatttgttggaagccccgtggttgctgcccctagctctactctggacacacagatgtctttatggggttctcatgtctcttgccatgatggggtagccttactggtaggggcaactgcaatgtaagagatgaggtacagaggcttggtttgctttgtaaaactcgtgaggaactaccaaaggggcatgaaatgaggacccaggaaggataacagcttctgtgctccctgggaaggtccctctatccatagtccttcaggtactgtggtcagccaccttctagcaactgctgctgcagtgtgttgttgagaaactctatcaagtccttgttatgacgtcaaaatgcccgacaaaggcagctttaggaaggaagggattattttgccataaagtttgagggttctgtccatcatgctgtgaaagtcacggaggcaggaacatgaagcagctggccacattgcattcacaggcaggaggcagagggagagagggcgctcagctacccccacccccgccccatctctctcttatgcagtctaggactcgctctcactcagttaaccccgtctagaaaccccttcacagacctgtccagaggcttgtttctatggtgattctaaattccatcaaattggcaatcatagtgtttctctcatacccccgacctcatagcaagtcaggttgcaagaggctgactgacttcttagggtcaagtccaccaatctagaaggtcacagtcttagggttttattgctgtgaagagacagcatgaccaaggcaattcttataagtggcatcatttaattgggactggcttacaggttcagaggttcagttcattatcatcaaggtgggaagcatggcagcatctacacagatatggtgttggaggagtaagtgacacacttcctccaacaaggccacacctcctaagagtgctactccttgggccaagcatattcaaaccacacagtcactgtgatcttgaccctggtcactttggacttggtgtagagctgtactatagggaacaatttaaaagtgattttgtctatggatttacaggcagtgtggataagaaggctactccatcctaaccagctttagaacttacattgccaaggccgagggaggcccaatatggaggaagtaacatcgctggagtacatcacttcttggggtagaacaaatatgttgtaggctagaggttttgaaaactgtctcagcaatgacctcactgcaggtgcaggaggaggagtctggacctggccacaggaggatgtcgtgctggttttgtgttaacttgacagaaggtagaatcatttggaagtgggaacctcaattgagaaaaacaccctcacaagattgacctttggggcattgtccaaagcgaagtttgatgtgagaggccttgctcactgtaggtgatgccacccctggcctggtcatcctgggtgctgtaccaaaacatgattagcaagccatgaggagtgagccagtcagcagcactcttccctggcctctgtatcagttcctgctgtgagttcttgcccttacttccctggatgacagacatgtaagctataaggtgaaataaccccattttccgcttggttgtttttagttatggagtttatcacaacaatagaaacacccagtcagaaattgttttagttagggttttactgccatgaagagataccatgaccaatccaagtcttataaaggacaacatttaattggggctggcttataggttcataggttcagtctgttctcatcaaggcaggagcatggcagtgtccagacaggcatggtgcaggcagagctgagagttctacatcttcatctggaggctgctagcagaatactggctaggatgagagtcttaaagcccacaatctcagtgacacacctacaccagcagggccacaccttctaatagtgccactccctgagctgagcatatacaaaccatcacagaagtaaatcttagccatagttctgctccctcagtgagacgcttcttgtgtttcctcataggcccggcacctctccccacaagcccaccatcgactgcacgctctgcttgccgcctgctctacctccatgctcatcctcttcaacctggtgttcctcgggggaattcaagttgggaaaacctactggaacaggatcttcctgcaaggtgagtggcctcgaagccctgcatgctgccatatgatctccttaggatgcagatgttattattgacttgagagtcttaggagagccacatttatgacatgtggctagcaagtgacagctgggaatggcttctgctccactgtgactgctacctgtgtgtaggtagctcatgttggccgcctgtgatgcttggcgtccagatgtgggaccctagctccctggactctccatgctcatcctcaccacatctccaatgttgtgacttcttcctgcgcttcccaagtgtctctagaccccaaccttcaatgtgcatgaagtccaaccttgttccatttatgctatgaagtcctgccagcaagttttcttgtgctgtcctggagctgtggacctgggtcctgggtccagctctatacctggatgcgcgtctctgaacatcattacccaatctctctctctctctttttaagtagacatgggtgtctatgtatttgtaggcacatgtgtgtgatggcatgtgtgcacaagaggtcaggggacaactctgtggagttgtttctttccttttacctttacagggcctccagggataactcaggttgccaggcttgcctggcaagcacctttacccactgagccatcttgctggccccaactgtgggctaatcttgtttcatgcacatccctacccccacagcaaagctacatctgcggcaggtaggatctaagtgtgtggcagttgtgaaaactttacagctgaccaccattatcttgggttaccacttctcatgggttggcactaagacattctgggacttgtgaaaggggagaatagaatattcactgagcaaagcactgtagccagctcactgtaatttcaaagaaaagatcccctgttccacgtcctctccctatgcttgagtttggggagtcccagcagagcagtggtggtggaactggacatggcacatctgttgtctctgtgtctgggttcccaaggagccccagatatttctgtggcagctctcttttcacaccagaaatatttatttaagacctttgcaggtgcaaaggatgggtgatagggtgaccgtgtcctacttttcttgcctgtggccatagaacctgacgcaatgataggcacatggagacttgggcgggggagctgaccttgggctcactgtcatctaatgagaagactctgatttccagttcagtaaatcaaatatatcagatgtttgctatttacaaatcactgtgcgtacatggatggaatgggaagcccatgctgcctatgatcctagcactcaggatgctaagggtgaatgaatccttgagagtctgaggccagccttagctacacagtgaggccctgcatctaaggagtggtgggacagataaagaaacacagattataaatatggaagccaaatacaaatgttttccatgtgacacttgactggggtaactgtgcaaatgtctgagtgagctgctggaggccagtaggcagcgtggtgggcttcccgtagcaggtggctattacccaggagggtgtttaagctgagcaccaagaaggccagagaaactcatgatggccgccacagcagaaactccattcttggcggatcttcactgtaggtgttcattactcagggctgaggagatgggtcagcaggttcaggtcctcagtagccatataaaaagcttgtattaccacacatgtacctgagactccagagctgtgctgtgggcaggcagggggtggtggtacaaaggtagggataagagggttcctggggctttcctagctgccagcctagcctggtttcaggttcagtgagacatcccattttaaaggaatgaggcagagagtgatagagaaggacacttgatactaccccatggcctggaacacatataaaacatatacatactcacatatgcacatgtgcctacctcctacacatgtggttttatttctctcacagtttgtcgcaaacccagtcatttttctaagctataactctaagacttagaatgtttgatcaagtctacatccttgtcttggcatcagggaagagaagagaacatgaggccagtgggcctgatactgaagaacttatatgtgacatgtgacgtttctgctcatgtcccattggccagaacaagttaggttaccatcccaggagccaggctggagctatggaaagcaggcaggtatgtagcagtagtctgtgtcaccccgtcacccagctggagatgtcctagaggcttggaaagcttgagttggatttgaggaagagggaaaccagtgattgatacatgaaaatcaactgtagtcaaggctgtgggaatggactcaagagtcaggagctagcttctggcagtaagaagttgggggcagacctgggacatgttatgttggtgctgaagaggacagaacaagatctaccgagtgcctttgctgctcctgcatggcaggaggctcatagctgtgcttgcctggcaggcaccctgtggatctgccagtatatggggccagcattctgtgtccttctgtggcctgtggtaggacacagtgtttctgccctccttggactcaggaggagtgggaattctgattctttgtataagactctgcaatcatttctcttcatatttctgaagccgggagttctccaaatagacagacagaccttctaggatcttgacccatctgtttcatgggaagctttagtcaggcaatgtctgctgggattttgtcagttgccccataaaccattttcttgttgaggtttttttccccccctgagttcccaagttttagatctctcatggaagggagtgagcctgacggtggcaaatctcccatcctggcaagcctaactgtctcataacctgacagagatggctgttataaatattcatatttaggtacaagaactaattaatgagttggtagtatagagatggctgttataaatattcatgtttaggtacaagaactaattaatgagttagtagtatgtgtcctcaggtcctgctggggggttaatagatgagcatcctaaaactgaaagagaaaatctgacttctgaagtcatctggcccccgaggacccccagaaggacctgttaccctatacatgtagctgctagtggatgtttcaggacctcctgacacatcctgcagcttaggcatctcggacctctgcctttgggtgtaagatcaattcctattgctctaaaactcatctctctacacagagatgcgatgaagatgtcaggagacctgtctgcagggagtggctcatattctagacagcagggtttgacagacatcccttcctctgtgctgtgatggcttgggtattgctgcagagacagagaagcccttaatcatccatggatcccaactcaaggatcaagcagcacagagaagggacagagattattaagggtttgcaaacgccattgtcttagtttcttttctgttgtgataaaatgccagacaataccaactgctacaagtaccatcccattgtggcaggaaagtcatagaggcaggaatttgacatatctggtcacagtgcttctgcaatcaagcagagagatgaatgcttatattcagattgctacctcccacttaagaaagtcctggccccagcctatagggatagtacttcccttctttaggaagggtcttccccaattagcataagtaaaatagtcttttccaagcatgccagaggctaatttatggtaaatagttcctcacaagcatgcttgaaggcttgcctcctagcagattccagtcctgtcaagttggtagtcaatattaaccatcacactactgcgtggcattttctgggaagataggatcaaatatctgcccagcccagacacattgatgacacattgaaggaacaattccacgcaagtctagcttagtgatccagtgagttcaactccattacttatggtgtgaggtttcttaaaggggtatggtaaactcaaagacgactgcaccactgaacagcccaccacagcatggagatgactcacagaagctgcatccctggagctccctgccccctacccccggcccccagcagcccacaagcagctccaaagaagagtctcctcccactggcgatgcctgctgctcatatcatcttgggaggggactttgtgactcttaactttttgagcttctgggtcttgtaggtccctggctcttgagtcatgtgaccccctcatctaggagggagtgttgtagttcacagttagggacacatatttcacagcaaatcagatactaattcacacagatacaaacttgctaattctgcagggatatggaaactgtagatccacagttgccaaatctaacagagatggatgtacccagatacatgcttactaatttctactgaacatgactgcatgtataaataaacgctcactaattctctgggagtcatttcccacccctctgatgttcctacaagtatctcatggggtagcttggaagactgacctcagagccagcatctccctgtctctagtgccgtaaacctgactacagtcggctgttttaagcctgcaaggttactatagtgctcctatagcagcctttaacctggactccgggtgagagaggaggctgagagactgggtctgctttttctactgtgcaccttccctgcactgatacagaatggaaggtagacatgcctggggaaaacattggggtctggtgtgtgtaatgctcacagcatttgatcagtaagactcacctctgttgctgagataatttagcagagagtaaggattccatgccttcatctctaatatatgtgtgtgtgtgtgtgtgcgtgtactatttaaacatgctttaaatgacttaaagttttacagatttaaggaggtcgtggctgggggtcttgtgccacccgcttactctaggatgagctaccctgggttatgctcagcttgctctaggatgggctaccctgggttatgctcagcttgctctaggatgggctactctgggttatgctcagcttgctctaggatgggctaccctgggttatgctcagcttcctctaggatgggcttccctgggttatgctcagcttgctccaggatgggctaccctgggttatgctcagcttgctctaggatgggctaccctgggttatgcccagcagaaacaagcacaaagcgctgcttatgtcgtatttgcttgcagaagctttgtgatagagaagcttcaaccttccaggctgacgtgagcatagatttcttcagcaggcagctgttgcgttctgctctgtaaagatatcaatgagacgtaactccgttttatggcttttcctgggggagacataaagagacgtctattcattccagatagggtactcacaaaccaagaacgaattctgtccaacctcccttagtggaaccagtgagtttgctggggttactttcatgagcataggtgaccacagatctctccaacattagctccacacgttggcacacacatgcaggtgcgtctccccacacacctacgcacacatacacgcactccaatacacagatacctgcatgtagacccccaatattctctttcctgattccttgcacaattgcttgggtataccatgtacacacacacacagacacacacacacatttgtcttgcttcttccttaccatctcatatagcttggcaaaccatgactcaacacttaactcagaggagttaactcttaactctcacttaacaggagaggctccttgccctgaggaacctggttccttttcctctggattccagtgggggacgggagagggtgctgttgtacatgtcagaaccccaacattccctgaaactgtttgctatttctagtggagagaggagaaagtgtattttgtccctggttgctagcttgtccagacagtttattcatctcctgatgcaaatgcttctagacaggaactttctttaaaggcaaactgaagtgtggcactgaagatccaggggatctgtggtgatgtaaaactccctccctcccatcttctcaggttcttgggagtgaaacttcgctcatggtgtcttttgcatgagcaaagacagagggcagatgtcagcatctcacaggcttattgtgagagaggactcattcactggacctccgttcaaatggagcttctatctccttagatctagacactagagcagcatttctcaacctgggggttgcaacccctttgggatggaactaccctttcacaagggtcgcatatcagatatcctacacatcagttatttgcattacaattcataacagaagcaaaactaatcatgaagtggcaataaaaataattttattgtgtgtgtgtgtggggggggggggtcaccacaatacgaggagctgtattaaaggatcacaacattaggaaggttgagaacctctgctctagagggttgatgagcaggtgcctcctgcccagtgaagttgattcacacttcagtgtttatggttagatatagatctgcccaccgtggccattcttggcatctgctctggtttcacttctgttgccatgataaaacacgcacaccaaaagcagcttatgggaggaaatgatttatttcagactactgttccagattacagtccatcactgaaggaaaatcaagataggaactcaagcagacagtcccaccacaggtaccatcaagagcagagaaaaacaaatggatgcctgcttgcctgctctcgtggacccctctcctgtctgacatggcccagcagtccctgggtggggtcttcccaccccagtaatcaagacaattctccacaagcgtatgcacaggccaacctgccccagaccaaagcgctcaacacagcgagaattaagcatcacaacacccggatttaaggctgtgagatgcgttggcttctttgccccctgccacattgtcacccctgtccctgggcgtacgaggtgagatgtgagacccgggcatcggagtccctggagactatcactgggggaatttctgaagttgctaggaatgacgtccagccaggatgcctggagatgctctcttctgtgcttgtgtgtgaaacctgctaaccaggggttctgtgaaagaggggaccttgtaaagtatctttaaactgaactcctgcatagatgtgattgatcaggtaggagtggagtggttgtgtatctttgctggtaattaaccctacagattcagaacccctttgtttttattaactgctgaccacttattgccgccaccctccatcttcctgtccctagtcattcaattgcagggtgctgtttggtgtctctggggaccattccaattcctctcataccttcctataagataaggtgagggaggggcttgattttcctctgccaattgagacaaactgagagcgagatttctttttaggaaaagctgtgtgtttgtatgcaagtgtatgtgtgtgtatgtgtatacatgtgtgtgtctaagttgatagtgtggaaaccaagtcttcagcaaggtccatgctgtttattctgtatgggtgggtaatcctgctaaacacccatggtaagcaaacgtctcctgctaatcaaacctactttgaaaatggccagcagagaccaagctgtgctttgtgctttttgcccacttcattgtcgatccaattcctgcctcaaagaaaagaagtattgatctagactgggcagtgtttggggctagagtttgtcagtcagccactggtgtgtgacgtcacctcagagattaatggcttgagcaatggctgctcagttcaccagcctctgtgactagtgaaggctggcaggcctagcgccacctcttgagtgtatctgtggtcggccttggtttagatttactagccgagagaaaagatgacagagctcctagggagagctcatctgtcgtggcgatccatgttaggttagagagcatcagttgtctgggaaagaagctcagtgggaagcacgcgctgagcacgtgcaaggcccggaatttacttctttcctaggactaaacaagcaaaacagaagccaaactaaggcaacactgcactaacctggcatggtggccactgtcactccgacacctgtgaagggagagcggggagtattactatgagtttgaagccagcctgggctacatagtaagactttctcttagaaaaggaaaagtaagaacaaaaaccttaaatataaggatagcagtaagtgaggaggctgggcagagctacccaccacagccatccaggaggcactggcaaaactgattccaaggcaaagccagggcctctcaggggctcccagtgggctggagttcctgtaggctggagtgcaggaagctgtggatagttctaagcaacaaaaaagcccaaaggccagccattgcctgcttgttcaccattgtcttcagcatcgtccattaactgggagtgttgattttgtaaaagacagtaaatagcgatggtgggaaagtacatgtcgccctgtgccaggctggcagggggagacaaggcagagtggatgcagtgcatggaccagcatccagcaagctgtagagcctctggcccccggagcttacccactgtagcagccgctgtgccttgggctttctttgccctctgaccgtggtaacggcccagctgctgccctctccagcacagagaaggaggcagctgctaattttagacaccgagtacatctccaggcagcacgactcacaacttattaaaaaaaaaatttttttttttctggttgcatgttcatgtgaccctggataacaaaagaaggaaaaaaaaaaaaaaacaacaacaacaaatcttcacctgctaaaggaaaatcgaatcctttgtcttaaaaaccaatcttttatgtcataggaccatgtccttttgctgagggaaatctcctgggggaccagggccttgtccatagcagaagcctgtgacctgtgcctttgaaggacaggtgggaggcaggaatgagggatcagccagggcacttgtagagataagtcggggcttctttggggttgaaacacatggggtgaaagaccaagagatgcagcatttcattgacaaagctggtctctctccttcctggtgtatgtacattgggtagatgagccgctctcatttgttttgggaaggtctcaggtgagaggcgcttacagcagggcatttgcattctgaatgttgtcagatcacgtaatgttcctgcagccaaactgttccaagctgggatctgagactgggtacctatgtggttcattatgagaacatttccaaagggaaaggtgggcctgggagatagggtgaagtgaaaaactctaagggcccaaggctgggagagttgtgacccttatgtctgccttcttccttgctaatacatctaggcttttctggagcatgctcagtccttacatggatcccttgttcagctttcatcatcttgagtatctttcatatgttaattttgatctctctctctctctctctctctctctctctccccctccccaacccctttcccttctcccctctctgttctcccctctcctctcccctctctgccctgctcctctgtaacagaactgagcctggacatcttctggccacagagacctgtctttggagccctgcttttctctcagcttgctttgttttattcagctagaaggaatcagataaatttaaacttaacggaattgatcctggtcctgttttgaaattccctttgtgttcttggcaccctataatgtcgtaaatatgagaatatttaaagcctctcatctgcgtggctgtgcccaacaagatgtcggaagtgttaggtcataccttctgcatcagtcatcagtaaaagagtcctcactaaaagaggtgaaagcacacagtgaggaaataagaaacacaggaagcctctcagcctatctgggccaggagagaggggacagtggccaggggagtctggcatgaggacccttaaaagagaaaagtgatggaaacaggtgtctccaaagttcctatgtccgtttcatacagccagagggcacagtgatcatggtccaactgacaaaacaggctgtggtgtttggggacaaagcactctgggggacaaaaaaagtgagtggttctggttggatggcaaaggctgattgtcatgcaaacagaacctccacccatcctgggtttactgttgcccttggtcatcacagaggaggtggcatcagaggtgggcttaaggatagggacacagacacaagagcaggaagatgtggttgctcatccaggagctggaaacttctgggatcaaatgggtgaggatgtgagatgaggcaggtgaatccacagatgtgctgaagggccccaagagtaaccagaacaccggaaatcaagccccttgctgaggactttggggtgtgcccatagtactctgggctctgcaagggtgacaggattctcacttttgaagcaagcatctatctgaatagcaagtggatctacaccagaggcagaggaaccagaaggaagcagtgtgagggagaatgggtcctgcactgtggttgccaggtaacaaggactgggaagatggagggggctgcaggctatcagctgggtcttcatagtgtgcatagtttagtggtcgtggtagctgatctggacagaaatattccagatttctttattgattttgataacctgccttagaacaggattttttcctgaattttgggaaaacaatggccaggagatttccaccctgttttctgacctttgactctggagactgagggggttgtgcaagttcaaggacagagtcttttgaagtaggcagctttgctctggctactgcccgaatgaatgtgcattttttctgaaggggcttattaagagtttctttttctttgtggacattttccaggtttatttgactttccttcttaaaaaaaaaattatcataattggagtttcttcttttctgctttgttttcagtattttaagcccacattgtgtctgtatctacccaattgcttctttgctactgaatcttacccagtgcccctttccttatgtgcttgggcatctgtggctgtgtgctgccattatctggaaaccctgtgaggtgtttctgaggtcttacacgaaggtgctatcccctaggccatccctgcatgcgtttctggaacacacagggctgggcatggtcacatctccctaaggagggatcagtttcctccctgcctccttagtgccaggagcctggcttgcttcctgtttacctgagtggtgaccacactcctctgggtcttggctgttgttcttttgtagcccatctgtgagctctggactttgcaaactctaccccagagatggcagcacagatagaatctagtctggacagatggaggcaggctaaggacgcctcttgcttccttggggtcccactttagttttattatcatctcattatcttggttacttacatcaaccagctttaaaaatggatttatttatctggcaatttcaagttttattttccttttacttagagaattgttcaaaacattatcagaaacagacatcttacttagagacaaaaagctttctgtagagaccctagtatttgcttgagtcaaacatgtcatttggactgtccaagaaatgacagcacacttcccatgtaaataggaattgccagagagtgctgttcatggtttccggaggttgctgtgtctctggtatccctgggttctgaatctttgttacaatctctttggaagtgggtggtacagggcttgagggacagacacatggagtgtgagacctggaatatggcacccaacctctcaaacatgtgaactaagaaaacacccagcccacaggtgataggaaattcaccactatagcccattgtgatgactcatcttgactggcagctgacagaactcagagtcatctgggagacagttctgagtgtgtttgtgtggatgtttccaagggttaactctgcagccgcctagaccctggctaggaacagactaaacgaaagggaaagggaacaggaggctcctaactgtcacaccatgtgacaagtcacctcccactcttaccactatgatggacttcagctttgatgttacacacaaacaaatacattttccccaagttgtttttgccacagcaatgagaaaggcaagggatatagttagtattgatagtgttatgttagcattattctgctttgaggtcccccctcttgttactgatgtccacatgcaagagcattggacccctacctgatgctgtatacaaatgacaactttaaatggatcaaagcttaaatgcaagaacgggatatgtcaagctcttagggaaaatatggatgatgactgagcatattttcttagctatggcatcagaacacagcggccaaagagaaaagcagatcaactgacattatcaaaactaaaaacgctgaggtgctgatgcaggaggattgctgagagttccaggccagtctgacatactaagtgagactgtcttcaaaatacaatgaaatttttaagaactgttttttgctttaaagacatcatcaaggaagtatgaacacagttagaatgaggttttgcagcccatgtatcagataaggaccttctaactggaaactctaactccattgaaaatagaggaagactcagggtagggtccaaggatgatgtgaagagaaaagcatctggagaagtcacctaggcaatgagtgggttgccactttacaacatctaggatgagtactaaaaaaaaaaaaaaaaaaaaaaaaaaaaaaaagaccaaaaagtaggacgtaaccagggatgctgaggatgctgggaaaatggagcactcatctactgtcaatgaaaatagaaaatggctttgtcaggcccttagaagttcaaatacagaatgacataaatcatcaatctcctcttggttatctgtgcaagaaaaataagtgtgggttcatacaaaaattggtatgtgtgtgcccgtggcaccattgcaaaggacggtcaaacattgggccacaggacagtagagcagagacgtgtggtatatgaaggatttctcagaatgctactagaaaccacttaagaataaacaacaattggtctgtgttctgaaacttttcctggggccaggtgaacaaatatctattcatcctagatggaacactggctatggacaaaataaacacacacacacacacacacacacacacaatgtatgcatacacatgcatttacacatgcacacacatgcatgtatacatgctcacacatgcacacgcatgcacacaccctaaccagttccacctagactggcttagagaaccagtgagtttaatggagtttccccacagaatcttgggtgactcaaaggcctcactgaacagcctaccccatcacagtgacacctcacaaaagcctcatcaatggtacccctgctaacttataggcagcactacagagtctcctcctccggcctgtgtaaccttggttgtggatcttataaccttcttggttcttgtaagctttgtgagtctcccgaacctccattctgtttccaggagagaattttcagttggaaggaaatagctacatcacagccagacttggcctttttgtctttccctctatgcatttgtctaattgtccatctgtccatctgcctatctactctgccttaacccagcccattaatttatcatgcacccttcttcctgtctcatgcaattctgtttttctccatcatttctcatcctgtcaatcaaaataatgttcacagtaataattgatgctcaagaccaggaaccatgccatttgctgctttttatcatgctactctggcatctttaatgtccttgtgcttcataacttagcataaggtgactttgcctggctctctgggggatatgctctttatcaatctatccagaaacagatggacacctagaagtgaagaccattagacagatcaagacttacagaggaggcaggggtgccaggaccacatcttggccctgctggatctttagggtagtgtgtagaaaaccatgagaactcagtgttaatatgtctaactcgctgctgccttctgcatgtggcttcgtgcaggttggatgcctagtagctgtgttcctaattatttacacaatgttgatgattttgaggttgacctgttctgagcagcttctgtcatgagtctatcccctcagtgccaccattcattgctgtggtgtcagctgttctcttaccccgcctccaacacagctgttgtatactctgtctttcagcctcacctgaacagcttatttaaaatgtggtcactttgctcttacctgtaggagattctgatggagcagcttaggatggccccaggagcctttactgtagagagcacctcagtgattccagtgtatcacttgggagaaactattgtaactgatctgcaaattgtaactattgtagctgagggaaactattgtagccgatctgcaaattgtaactattgtaactgatggctgctttggataatagcatgggaaatttctgctttcccttcctgtaccccacaagtacccatttcttcagactggaagaactgacataggtaatactcttttgactattctgtgtctcagtctagcacacccaggaattcttggagaagacctagaccatagacctaggcaggaaaatagtccagagcagttcatcacaatgataagcacccacgtttagacacataccatttaatatcagaattttgctcatcaatttactggatttttataggttgagagagggacactttgggaagtgaggtgatcaggcatgagtgggataagcaggtggcattgcagcaaatgctcgactccagagagaagcaggaggtggtaatgtgcccctcagtctgtgcccaccttaagacactgtatagaaacccaacactctccatacttgtgtgacaagcacttccttgactgagccatctcctcagcccctgggcattttttttgtctagattttgtgtaacagtttttgtagtgttatttattatttctttctacgctgtagctctagtatagttacttttctattgctgttgataagacactatgaacaaagcaactcacagaagaaatttgagtttactgtcccagagggttaagagtctgtcatggtagtgggtgggtgggtgagctgcaggcgggcaggctgcaggtggtgggcatagcagccagagcaggaaggtgagagcttacttctcccactgcatcaagcagagagcactaactgaaagcagacgaccctgtttaccctcaaagcctgctgccagcccctggaccatgacgtacttccccataatcattcccagccaccaacagggaaccaagacaaatgtgcaagactataggggacatttgtcatttcctcatctaaactagcacagtagcctcttcctcccaccccgctgtaatgatgtttgcagatgacagcgctttctcactctgtcaagtctcatttatgaattatttccgtcactgttagcattttctgtgcaccgcgtaggaagcctgcccatggtcacagagatctctctgtttcagttttagaagctttactttgcttctttttttcactttggtctcaaatttgtttgggattaatttcgtagaatattatgagattaagatcaaaatttggagggggtcaccttggacatcagatttacccagaactttccttgaaaaagccatcctctctctacagatgtgcagttacagtgttgggtcaatactgttcctagtgaggttgtataattcggtcactgccaagtcaagatgaccgtcttccctcttcagcattgtcaagcttattctaatagttctcagcacttattgcttcacacgcactgtcttaccaacttcttcaaaaaaaaaagttttagtttttgaaattgcatcaaatatatgtaaatttctatagcatctggtttatccttgatttatttagaacaataaaacagaaaactactaatcagtggtaagtttgaaaattatttatattcatggagaagtaactaggtgttgtattctgacatgttctggagtgttccactcatgtggaaagtgactcatatcttccagtggaagttggtgatgcagaagttagtggaagatcacaggttttatatgagctgcctgcacacagtggctttcatgggacacctcattagcatcactgtttattctaacaggcagctttggatgaaaacggagtacttttatttatcttaatggacagactctaaatgtaacagagctgatggctgaagcatctagagaccatgtacagccattcagaggtattcagggaggtagaaaatgtgtgctactctgaaaacctaacctaggaggaatgttttccttgatcacagatttgttccaagcctgctttcttttcctaatgcaattagcccatgacacatgaaggtttacagagctctatttgtagcttttattctataagggtcttgagattacttgtatcaatttaagaatcctatgaaatcattatcagggataatgaaatcatcaatttgtctatataaaagtacatcttcatactgattctgaagaaaatttgtctaatagggtgggctgatatctaggaatcattaggtcatataatagtgacaggaaaggcatatcagcaacaataagcaatcctgggatgaagtctcttgaggaccctgcatttcagagcaaactcatcacagccatgcaaaatggtgggccatctccaaaaaactcactcacttgccatagcctttcttagatggcttctgtcagctcaggcctcatttcgagaggtctgcactcctcaatgtactctcagatcataacttatgattaaaaattgtcttgtatgatgtttggatgagaatggtccccataggttcatatgtttgaatgcttggttctcagttggtggaaccatttgggaaggattaggaggtgtggtcttgctggtggaaagatgatagtgggggcaggctttgaagtttccaaagctcaccccgttcccagtttgctggtggctgtggatcaggatgtaagttctcagctattgctccagcactttgcctgcctgtctgttcctcattgctgccatgatgctcatggactctagccctcggaagctgaagccccaaacaaacaaaccctttcctttataagttgccttggtcaggttttttttttttttttttttttttttttttttacacagcactatataaaagtaaccaatgaagcattccatttaaaacgaattattttgaaagttagtttgtccagctcagcagacaagtcaagggtccaagttctgcttctgacatctgtgataaatgttgccatttttgctatgtactgaggacatactagaacaacttggtgtgtggcctggggccgccctgctaggagcctttagtaggcaaagctcagtagctttgtaatgggtaaagctgcctcttgaagtttcatttgttgcccataacctctgaagcagtcatttggagacagagttgcatgggccattgcttctgttgtgggtccagtcctcacaaagcttctcaaagggtagtcataatttctgtgctataaataaaaaggttgtcagtttgtttttgacccccagttcagcagataagctgagggtcctaccatacccgccacctccttattagattctatgtagacactaccatttagcactgctttaaaaaaacacctttatttacaatagatacaacacaatacaatcacttccagtactgtacagtgaatggtgggtttgaacatatactgccttgtgcggtccctgccaccatcaggctatgctcccctgctgagctctgtttcctccttcaagtccattctcctttcacctgggacttggatgtggctgaaccttggccttcttccccagtccttctgatgctggcctgggtccctcttgtatggtgcaagcacgcctctggacatgctgggttccttaggcagcttgctatactctggagttcctctcactctctccagctcacagggccccattatttcagttgctttggtcagaaagacgggattcttgtctgagagtctgtccctcttgctgtgccttgattggtatctgttctctagacgtcaaaatgggaaggcaggaaaaaaaaaatcactgatgaacctcctctaagcttgggtcttcccaaacctgttgactttacttcctgttacccaagtgcttgtttgagaattttatttcagtgttgtagggttcagaccaccttcttttataataaatgtgacgtggtacataagtgttgccatgtgatagaatactcagcactgtatctcagcagaatcagaacttttcacttatttttaattatgtttgatactgcatgtgagtgtgtgcatgtgtgtgtatatatatgcatgtggtgtgtgtgtgtgagtgtgagtatatgtgtctgtgtgcacatgcacatgtatgtgtattagagaccagaggtcaaccttgggtgtcattcttaggagctgttgagttgtgttttgagacagtttctcattggcctgaagttctccagtctaggttgagtggtcagtaattctgggattcacttatctctacctccctagtattgtggttacagacacaaaccacaatgcttttgttttatgtgtgctctcagaatggaactcaggttctcatactttcacagtgagactgagtgtcttaggtagagtttctattactgcgatgaaacaccttgaccaaaagcaagctgggaaggaaaggatttattaggcttatacttccacatagtagttcatcattgaagggatcagaacaggaattcaggcaggacagggacctggaggtaggaactgatgcagaggccatgaggggtactgctttctggcttgctccctatggcttgctcagcctgctttcttatagaacccaggaccacatgcccagggatggcaccatacacagtgtgctatacagtcccccatcaatcactaagtatgaaaacaccgtacaggcctgcctacaacccagtcttatagaggcatattcttaatgtgcctcttagatgacttgtgtcagaacactgggccatgtcaccagactccatatatatttggttattagtacaagagtatttgctgactgagcagcagaactttaaaaccagtttgcaatacatcttgaacatatctatgcatgttataactaaacacaaaagccccccacttgctccctggcctggcctctggctttggtgggatcagttcaccatgtcctatcctctcaagcagctccttcactgtgtgctcagccttcatcctctttggtctgatcaacaggttctagcataaccctgagccctgtgttggtagttaagaaaaaaatccccaagaaaagaagatagtgaatcccttttttttttttttgcctttatggaaaataatatcacttgcaagaaaaatgacctgtgatctcagagcccagagagataatcacttcccaactgctttttgctggcatatcttgcagaaaagcatctttatcttcaatttgcaaaatttctgttattaactgtagactataaaaatgattatgagcccaaagtctaaatgaaatgtcctgttgaatatttaaaataatgttgagtaatttaataacaaactggacatatctacacatttccagtttgctcattatatctaaaacaaaaaatgtaatatccccatgtattccaatttgaggtaaaattacgtacccctccatgctcaccacacacacaccaagggactaaaataatgggtgatttcttcttagctttctaagactgtcaagatagaactgggcaattaagacgtagacaactgccagccagtggtttaatctcagcacttgggaggcagaggcaggtggatttctgagttagaagccagcctggtttacagagtgagttccaggacagccaggactacacagagaaaccctgtctcaaaacaaagaaacaaacagatgtagacaaccacaccaaaggctgcaaggccaccactagaacattaggaaatctgctgtccttactctttccagcataggtggtgtctgtccatctttgatgtcaacctttcaaccctgctaggactgtttgtccttcatgccagccttggtgatagctgtctatctttggagtctttggcctgcagctgcatctcttctgagctctctaatcattagccactctctctgacttcctgtcctgagtctcgttttccttttgacaaggctgtcttcttggctttgataattcttctaatgggaaatgactcatcttagcctgaggaagcactgtcccctccccactccccctgtcatattctgaggaagggagccataaacccgccccttcctgtccactgaggccattttcttctaacctgggagctgatcaatatctatgtacagcttatcttacaggcatccttgcacagagctgtgaccagtgggtttaaaccctatggcaattgaaggaacaattttcatgagtcctgtggggtttgcttcttgactgacagcttccaagctccagccttctgtcctgtgtctcacctctgggcaggtgactaaaaacaaaacaaacaaacaaaaaacaaaaaactttgctctcctaatcttcctcccccttacaaccctgctccacccctgtgcttgtacttttgggaagttccagccatgaaaacctagctgtcagctcacagccccagtgtagataaagcctcctcactcctcagctctgctcaagtgccccccccccccgcctccccacaaagccttattgtaagggaaggtagcttggggaggcttctcaagctgtttgtttctaggtgttagcttatcatctttctcagcatcagagctacttttgcaaccacagataaaaatgttaaagtctgctaggtgcagcaaaaatgttaaagtctgctaggtgcagctttcggaccctcctgtgagcatgcagctaccacatgcttcctgcagggaagttgaagccttgcatgcattacctaggccttcctccctctgtcccagcagcctttgcttctctcctatctgccatcagtcagctctagactcagtagtcattggctgagatcttaaaccttgctctcaatatagagtttgctcagtcagtgccatttggttgttaatccctagaccccaaatctaccctcactcagtgtcaaagctgactgattttgtagctcagttcatgcatttccagcaactctatggagaaattagtaaccatgtgtattgtatgcatgataatacacagtgtaaggttaatttgaaaattgcatggaggcatgagcatgcattatgcaaaatgtgaacacaggttatattaggcactaggcacgtttgagttaacatgcctacatgtaggaatagaaagaaatgcagtattcaattcaagtgacaccaggatggagtctttggggaaaaaaacccagtccattctaagcataatgatcttacaatttattcagactcagacattcagaacagtttaatttcatgttaagtaacccaattggtatatatgaaaacagctttgtataatttgaaaccttggagttggcccaactgtataatagtggcctccacaaatgcgggaaagcaagtaaagggacaaatgtagtatcgtgtatatgactgtgtagtcaaccctggtgtgtacatggctgtattcagtttggaatcttgtctggattcttgtttttttgttttttgttttggcttttcgagacagggtttctctgtatagccctggctgtcctggaactttgtagaccaggctggcctcgaactcagaaatctgcctgcatctgcctcccaagtgctgggattaaaggcatttgccaccacacccggcttcttgtctggattcttacaaacatattcttttctccttgagactaagctcaggaatagggactctattagggatcctgacataaaatcacctcaaaacatggcctagctctgtagaaccctaaaaacaggtgttgtaaccctggtagcccagaggctgagataggatgactgcaagttcatccctagaagcatgtgtaaccctggtgatgcagaagttgagataggaggactaaaggttcacagaaagcctgagctatgcaatgagatctggtctcaaagtcactactgtcctggatgtagcttggtggcaggcagagtgcttgtgtgtcatctacaaagctctgggttccatcccagcatctgagaatggagtatgtgtcagggacaggagactgtaagctggacagtgaggcagctctagttgcatggttaggatcacaatgagtacagtcagtagacagaaaatactctaaccagatgtcactgtggctgagatagagtggattttaaagtcaagaaaacaaacaaatggctcagagaaccaatgttcatagcttacaaaagactcaggaaaccttagctggggcaccccagggctctctttattgtctggaatgggagtgggagaccagaaactggcttcaaccatgggaatgaggaatgctgtgtcttccttcttgcaggtggttcagcttagagcagtggttctcaacctgtgggtcaagacccctttggcagccctctgtctccaaagaaatatttatatcatgattcataacagtatcaaaattacagttatgaagtagcaaagaagataattttatgattggggatcactgcaacacgaagagctgtattaaagggtagcagcattagaaaggttgagaacaactgccctagtagcagctttgcttaaggcaggcttggtaagcttccataaaagagttgaactatctgtgcattccagagttcaatagaaaggagcaatgtagtgtgtagcaaaatatggttttttttttctttgttgaaaggacaactatagagccagggagattgctcagtggtaagagtgcttactaagtaagcgtgagtttaggtaccatgtaaaagccagaaatggccacagagctataatcacagtgctgggggtgtggacatgagtgaggggggcaaaaataaataaataaatacataaataaaataaaaatttaaaaaagtgaggggagagatcgctctggacagccagccaagctgagaagtgacaagcttcaggtataagacatcctctagaaggaagggttttttgcagcttatggtttcagagggataagaatccatcaccatcagaacagggagcatggctgcagggaggcatgtgctggggcagcagctgagagctcacatcgtgatccacaacctaggagtagcaagatcagtgttagggtttggggttagggtttagggttagggtgacagtctttaaaaagcacaaagctcatccccagtgacatacctattccagcaaggccacaccttctaatccttcccaaacagcctccaactagggaccaaatattcaaatgcccaagacctgtggggggtcaccttattccaaccatcacaaaatgggatacataatgtcctcctctggcatccacatgtctgcaaatgggtatgtgtacacacacatcacacacacacacacacacacacacacacacacacacacacggcaaatgtaatagtggggtatttgtcttatggctttggaatttagcaactataaacacatttaaggggatttagatacaactcgagatgttatcagaacacttggaagttcttgagtggaagatgattcttctcgttccagagtagctgcatattcctgagtagttcccacttgaaatagtatgaaaggtcacctttctccattaaattgtccaggatcccagccagggagtggcctcatacatgaggtcttcctacctcaagccaattaagataacaccccagagacatgccagaggcccatctcctaaatgactcttgattctgccaagttgacaattgataataactattataaatggtctatttatggaggtctactctgtgaaaacatgctggatagagtaagcagaagaggtttaatgcaggaaaatgcatgcatgagaactagaaagcagagagtctaggggaggggaggtacttgatgacctaaactctaactatagtgaagaatgggctggggacaaggtacagggagctcagagaagaggtcctcagggctgatcctcatcccactgagaaaggcctcacacttaggcttcttacctgggaaggctgagacccccagaagagagtgtggctgagcccagagttccttctacattctggactcatagtttgcaacaggaaatccattcctccctttcctcctcccagtgggccttgatcagagtgaagaagcacaaaagcagatggccaggaccatctgcacaggcacgtgggaagccgggtctcagagtcaataaagagggcccttcagcttgctcctggtgacccccaggctgggggttgattggtagttaatagaaacccagagcagggatcagaggggctggagatgggaggcccctaccacctgatactggacccagaggtgtgatagaggctaacatagctctgcctcacccattatagccacagactggctctgaatcaaaagaggacctggtgtgcagagcaaggggagtaactggaggagctccatacggtctcgggggcagagctttgctcacccttcagtcagtatgaagtggtgtatcagttggggggggggaaggttgggagggaggaggagaggtgagagaggtgacagggagacaggagggaagggacggtgaggaagggggaagagaagagagcaagtacactccttttcttagctggccagcctgatgtggcacgaccacagcagcgtatagcctttcctgcccagctcacatgacccccacctgagtccatgatgctgtgtttcactcccttccttctaacaaataattcgaagcagcagagactccggctgctctggaggacagatgtggtgctggccatgtgcttggcacacacagtccagctgtgcccgggcaccataagcaaccatttctgacaattagagagccctaggcctgccttgtctgtggcgccccctctggctcagtgccttggccttacttactctcctggggtggacagctgcagaacacccttcagggagaacatagtgacaacttcacacccacagttctataaggaaaaagtttcagactagaaaaacgtcaggacaggaacatgcagttcccaggagaaggcaattaaacaaatgaagagatatccaatttagtgtttcttccccgccacactgatgctggtggtgacccagtgggactctcacagcctgagcagggttctgctgctgagccacaccccttagcccttcaatttcactcttaactgaaggttggccaggtgctgccacctcaggttggcagatgtccccttcctgctcctggcaagggcttaaagtaataaaacttccagagcaggaagcttgcaggagctattcaaggtgatgcagaaattctacttcacggtcatccagatgtgagttcacatgcgtggagtgaaacgtgagggaggacattcatggttgtcatagcaaagggacaggaatgaaggactgactgactgactgactgccagagaccaccacagtgcacagggcacatccattaggggaaatgttcccagccgttagaaagcatgagggagcagcgtgcatgtctattagttttctgctgctgtgatatcacactcagacaaaagtaccttagtaaaggaaggactactgtggcttacagttccaggggacagagtccatcatagcggaggaaggcatgacagtgggagcaggaagctggccggccgtgttcttatccatacaaggaagcacaaacatacagcaggaaacgggattaggctatagaccttcaaagtatacccccactgtcgcccttcctccagcaaggctctgctcctaaaggttccccagcctctccaaacactactacccactggggaccaagtgttcagatacatggcactgtggggaacaattctcattcagaccaccataaggtacatttatgaaaattgccaatgtgtagaaccactaaaaaaaaaatagaatgaaaggacattgtggtatttgcattcaaacccagcatttacttcagaatatattttcagtgtttcagtggagactcccctggaggctattagcccagccgagaatggagagtggggggagctagaaggaccagggcctcctgtttcctggctcctgtacactctgctgctttatcagtcaggacattggatctgaggacctgttaccctgaggttggacggctgcttctgtccacctctccatatcgtgtcaggcttctctgcctgtgcccagctggctctggtatggatgctcagcagaacagcagtcaacaggaaagtgtgtgtggcagcctcagccctctcagcgtttgccctgcagagggccctagtagatccgaaatccagctgatcagttagagttgccagaaggatccttggagtgggaagtatgcacacagcccagctggagtccggtactcagtaggatgtgcctgctgtccaatgcagacttgcccttgggaccattagacggagcatgagccgacagggaatacactgttcttcagagcaaggcttgttagctgcatgaacatctttctgcgtcatttgagagttgagaaaggcatgagtcaccccgtacgtcatcactgttccaaactctccactaagaccctgcctcccttctcacgtagtcactgctttctggagagccaccttctgtctgacacaggactcccgtgccgcctgattggcaggagacattcgtttgtaactggacttgttatgtgcttccctgggaaggaaagatggatgaatttggaggggttacctggtccctgctgcttgcccacatcttagtacagactcttgtatgccccttcctatagagaggaatctgcatggcctgaaagctgggtgataagaatcagcaagctcacctttcgttggggggctaagaggccccctgtaacccacctccacccattggccccagttctgccttcttgagtgacttagaataagtctgatcccctttcccagtgaccttgtgaccttgtggccttttttccatttgggacattggcttgtcacacacctacatggagggtccttccaggcctgcaaggggtgtgcctgtggcatcgtctcttggtcagcacacctcaggactatctaccttttcttacccctcccaggccccatttcccaggatggcagcaccctggctcctgtctgggcccagtgactgtgttcactccatgagatcccaaatggctctgtaatctgagactcttacagacgtgggtccttagggaagggctccaataaggactctgtgactgtcagcagaatccttggtctctggggtgcatggctttgatgggaggatcctgcagggtccttttatcttcactggacaatgaaataactccctggggagttctgatgtatttgggggagagagaggggcctggggcctggcctgttcccgactgcctccccaaacccatgcctagtatccgcactctggaacatgagcagctgcagccatttggccactgagaagacaggctgaggacagtgtccctgctgtcgcattccctaagcttggacactatctttacctctgcttctccctcccctgctctccaggagcttgagctgagctattcccaaatagcactggtagacattgaacccacatttctttgagctgatctgggaacattctgggactcaggcagctttggttccaatctgcactgagattaatccttggctctgccccctccaaggaaacccatagccagcctgccactggccttgctgggagtgggcaggagagagcaatgtgggtgctgctgagaccggcaccattaaaataaaatggtggctgctggaagggagagtgcctcagctttcagccctgtcctgttccttattatacctgtgagcaaggcagactcctgaagaggcagcaagtgggctggtgacgcagcatccttgacaggaggagggaacatgccttccttgccccagtggctgcctcagtttccagtccactgtggtactgagagctccaggaagcagcagcagctgctgctgctggtggtagtggtgctgctgctgcagggagcatgctgttctgtttgttccagaattcaagtcaagttatttgaaattaatctcacagctgtgctaggcagggaccatgtcagatgcacttgtggtacctccctgcccccttcagatgtgtatgtggctctgcatgtgctttccttcctctcaggatgctcctggaggatgcactgacagacttgggaatgaagtggtagacatctctgccctgccatcttgagtatctgtgtttattcataatcagcacacaccaggttcctttctctcaggcaacatcggagagcacagatgatacctagaccatgagtgtgtctgtccactgactacatcccatgatctgggctcagaggctgagtggatatatctgtgactcaggtcctttgtactgttagttacctggagtagggacttgcagctttgtgagaacatcgagatagcggttgtatctgtgttcctgcagcctcattggtcattcactgacatggatgtcctgggaagaaggaaggctgttcttcctcatcccttgggggaaatgctgtgtctgctcgctgtgtgtgtgtgtatgtgtgtgtgtgtgtgtgtgtgtaccacacaccgatgccaggtgccttccttttgagacaggagtttactgataacagtgaagctgaccagcaagccccagggatcctatttcctgccttcctagtgctggggtcacagacacagccaccgtacctaggaatatcactcaagtcctcatccttgcaaacaatattttaccattttaccactaaaccaactctcagctctcatatatgggttccttctgaaaattcaattgctgtgatcaacctcagtccaaatatataataaatggggaattctagaaataatttataggtttctggctgcgaatgtctctgatccaagaggaagcattgtgtagtcttgccctatcccaccttgcgtataaatcacctctctggcctgtgtgtctacactgtgttagtgtcactgccccagtgacccagtgacccagtgaccctgtgacccagatatacataagcaagtgatcactctccattggctaacaacagcctcttggtacacaacccatgtcattcccctccttcatcttatcaggtaagccttgatcgtctcccactatgacaaggcgaagaatgactagagtatcgggatactaacagagagcagccacagttaccagatgtactgctatatgttgttacattgtttcggtttgctattggttgttcatctctaactgcatttgacttatagttgaactgtgttgtagccatgtgtgtagaagaaagcctgctgcctcaggcatccactggaaggaatcttgacaggcttgcctgtgggtaaggtggccctgtacagatgcagatgaatagacaaggcatcctcagcatgtggccttttgtgtcaggaggcagctttccatagctcatttgcttaagtaggcaatgcccaccctgttggttgcatcacttgattatgaattaacaatgaaccacaatctttgaggctgtttgaatagcccaagagtcggaggggaaacagctgggaaggccggtgactgggcagccttcggccgcagtggctggagtagcaaaaagtgctggggacagtttctcagggagcagacgtctcaccctgttggcctcggagagagaagatgtgtttgttggctcctcctgctttcctgtcagaataaggataagtagctctggcgtgttctccttgcttcctctgtgtcagatgaagtcattcgactttacggtagtgagtgctttggaaagtgtctgctgcttatgccgggagctgggacaggatgagcaatccgcagaggctggcttcatcagcctgggaaattgactgtgaacaaggtgatttatataggccactgtgggtgctgtttcaaactggcacacagcacctagcaagagactcctccttaaggtggcaggatgctccctaagggtctcccagctaaagcccctggtgagcttcaggccataacaggagtcaaaggattgtgaccttgacagccctgttagagggccatctgagcacctggaatgagcccttcatccccacagacagaattcttcactaatggaggagcagctcacaggggcatttaccacagactctctgtcccctttgtagtgctgtgaagggctcagacctagggttgctcaagagaattagtgataatggacatgtgcaaatgcaaggtgcttttgtttctgtggcctcccaccaatgaccttgggcacctggtcagggactagtataggatttaaaggaggtgaagctagtctgggaggtgaggctaggctgggaggccagggtgcttgtagcctgtggtctgccttaccctgaaacaagtagtgcaccccagccctgcagccagatacactttgaagctgctctgcaagctgggtcagctagtagttatactttggaggagggattggccttctttgatccttggtcttcatgtggctaagggacagggtgcatacctcattgctgagacaggctgtgagactggacagagctgcggacagtttgagcataaggaatgactatctgtagtctactgatggacagctatggcatcaccctgaggagtctctggaacagttaaggcccctacactcacaacacccacaaccccagggaacttgttaaaaactcagtcttaggtctgaaacttgtctcctcagaagccacagggtggggccctgctgtctgcctttaaacaaggtttccttggggatgtggatgcagcctcccttacacaagagccatttgtgtgtgtgtgtgtgtgtgtgtgtgtgtgtgtgtgtgttgtttttgtttttctcatgagagcatgggtctaaaacctgggttctggcatagcattcttagaaccctaaggtaggaagaacaggtccctcagagcttttatctgtgtccctgcgtgtttggaatgggcccagcagttcatgggcatcgatgcctggacagctttgtgagtttcatgtgcctgtccctggatcagtagccagccctctgccgggaaaaggctcgtgccccacaacttattaaagatctaaatttagcccaggagggaggaagggacttgggctcaagaccatttgatgaatggctcgtgggatctggctgcagccactggagtaaataggatttaaatgaagcgcctcgccatttcccgcatcggatctgaacatcgttaaacacaagtgctgcttggagctgcacttgcaatgaaagcagccatgcaaagaggcatttgaataattaacagcacgatgacggtaaacctctccagaggtgtgcagagagagcctaggcaggatacctgtgtttctaggatcccttagccagcaaactcagtgggggttgggggtggggacacttccggaactgtctcggaagttgtcctggtgggtgaggatgactgattggtggatgaagttgactgatgcccaggaaccggactcatggatctatctacagnnnnnnnnnnnnnnnnnnnntgcagttttactagttggtggatgtgccggtctttaacactggtgtagcctcccatgtccttgctcagtcagctctcagagttctgcctggggctggcctcagtgagagagaaactgctctttggtcctcaaacccattgacaccccccccccccccaagacgcacctcttcttgtcatctcctggaatcacgtctttattcagtcttcctgttggacaaacataactgagccaaccagttggcagagggtgactgggtcagccctcacgctgaccttaatcaacacaggctgggacctctgtaccccaagcataggaatgtgcattggaaggcaagtcttgtttcctttgagcctaatggctttttccctttctcaaaatggctttgaggctcatggtgacattgcttcatgggactaatacagaggtctatcagctgtagaaaccatgagtccatctgtgaggggcctaggtattcctcaaccctcaggagaactgttcaccagcagatggtcattgagcactggggagctggagggccagtgaacagcaggtgcaggggcctctgactggaacactcacctgggtgcatgaagagaagaagctaaggcattttaattgcagataacagtgaataatagactaaaaggagagaaggactacctgaaagtgtgatctttgtaagctgagcagagccatcacatatgaaagcttcacacacatggacagacatggtgcccagaggctggaccatgttcctgcagatcatgttcaccaggtgaccaccagacatggatattctagaaagagtaaatggtaggatgtggcttttgaaaaagcaaggtagcagctggactgttgcagaagtggataactcagtgagcctttggtggggcgattgacagcccctgcaccacccagcaactcagctaaccctatccatcaggagtgcattgatttctccaggggatgctgatttgtgctgactcagctgcttcagcttgtcctctgccaaatccatcagcagggtgaagaaagagcatcttgagagccccacccccaccccaccccccatggaggaagggaggctccaggagcccagaactgttactgacacacttagaagaaccttccctgggaggatgcaagactaaagactcaacctcatctaacaaccaaattgtgctttcctgcatgctttgtttgagcccctggcatttctgtagcctatgtatggtttgcgtctgtgatacgtatgtctgtgtgcgtgagtgaccagcctgagacctgcatgtctgattggtgcctctgaggtttttttttttggttccaacgttattgcaaacagttaattcatccgtcaagagcatcatccagtgcgtacagtttgatgggtgtttgccagctgtgtaaacgttagacaccagtctcactatgaaattacaaaacgttgttctggtgtgaagttgcacacatacaagtccagcgctcaggaggctgaggcaagaaggtcatgagtttgaggctagcctgagctatagagctaagaccttatctcaaaagagagagatgaaaggagagggagagaggggcagggagtggatgaggaaattagagaaactgcctccttgccccaggagactctttcttgtttgtttgtttgtttnnnnnnnnnnnnnnnnnnnntgtttgtttgtttgtttgtttgtttgttcgttcgttcgttcattcattcattcattcattcactttacatcccaatatcagaacccttctcctctcagtaccaccttacacataacctcccccatccccccctccccttatcttttgagaaggagcccctcctccccctctagctctcactccccagaactacccactgccagcacatcaggtccctgcaggactagggacatcctttcctactgaggccaacccagcagccaatggaaagagatgcagatacctacagccaaacgttacatggagctctgggagtcttatggaagagttggaggaaggattgagggacctgaagaggacagggactctacaggaagaccaacagatcaactaacctggatccttgagggctcccagagactgaatcaccatgcatagagtgagcatgggctggacctgggctccctgtacatacgcagcatggtcccaagaacaggagcgggggtggggtgggggctgtccctgaatctgttgcctgcctgccattcccctaaataggcagctttgtctgccctcagtgggaggtgtgccctgggagactcttactaccctctgcacctgggctcctcagccctaactcccagtaaccacggattgttgccattataaattggtttgcaatttttataaatggattaatttactatatattacttttctcaagagcttcagcctcgttctttattgtggtaaattgtatataacttaaatatggcttcagctctcgcctctcagcccctgctaatgcttgtatctaattctttctaagaatctggccaatgtgggaccccgagtaagcgggatcacttgcgtgttcctttgtctgactttgtacatgatgcgacgtcttcacagtccatggaggctgttgctacggatgtcagaatttgtgttctttctggtatctgtgtgtacatatcacactgagtatctgccgacctgccggcttgggtcccttgtacctttgtgaatatgctgtgactctgtgcatgcaaatatttcttgtgggctctgccttggagtcttcagtcacccatgagtctatgtttggtttgatatctagaggcacctccatgatggtgccacagccaccttgtgtgttgtgtgggtggtgcatccatgtttgcgatgtgcacacgtgatctgcctgtgtgtggagatcagaggaggagtcaggttttttttttttcaagttattttatgtgttgatgttttgcctggaagcatttctgtgtaccacatgtgtgcctggtgtctacagaggccagagagagcactgggttctatggagctggaggcacagatggttgtgagctgccatgtgggtgctgggaattgaactcaggtcctcttgaagggcagttggcactgttaactgctgagtcaccactcaagcctgactgccttcctcaaaccttgtcttcttgacggttctctcactgctctggcagcgagcctggggcatgcatgccataattctctattttcacaacagttgtagggatcaaactcgggtcctcatgcccacaaggcggggacattaccgaccaagccccctcccccagccccgtgacattacagtgtttcattagagcctcccctttttctgattcttttttccacctccccagggactcctcctttggcttctcgagacccctcttgataacagctgtttgtatctcagcctgttccaccttttcagaccattaaaactgctcagagaatagctgtcatgataacctcaagtatagtctctgcctggttttccatagctgtctccctcctgatggctgtagtcaccgcacagctccgcatatcctgtgtaactaccttaaccatattaacggtagtaacaccacctattccaactgcactgatcatcacaagtgactctgctgccctctctctactcttaacatgagttaactgtacctgtcttccaggtctgccctgttaaatgttcccacagccttataatctaggcacagcatttccatttgccagtgattatctgtttaaacttatcacttgtttaggtagtaaggtcaaactgtcaaaagactagaagtttctacagtcttgaatctgtcaagaagggaaggggcagagggagacacgggacagaccccttcagctccatcttctaatgactgacaagcctgtgtgactaaacatcacagcagtcctcagggtgctgccattctctgaggaggacgaggaaaaggagggggagggggaggaggcggcggctctgccagggctgggttagcactgcctgtaagcaataccctgtgacatccaggtctagcatggagccaggcacacagagggagagtatttattgctggaatagttggaaggatgacttgtggccatgcctttacttgtcattgtgggttttgggggagaggatattgctatgttgcccaggtgttctcaaactcttggatttatgtaatgcaccccagctccaagtagcttaaatgataggcatgtagtgttgtatacccttcaaagtgtgtacccctcaaaatctgtttgtgctctcacttgagtagatggggaaaccaagactttactaaggtatcgtgtccagatgacaaacgtcttgagtgctgcatagttgcccaggtgcctcttttcagggtatatacagtaagagcagggggacccatagaacccatcttcccatgatggaggacccttccctcttacaggtaaagatttcccagagatggcttcggacaaacagaatcatcagtcacagctggtttaggctcagctttgtgtaagtgaaacttacctacatgcccacgtctgcaggtggcctctgggctctatgttgaccaaacacccaatgatgcctcaccccaaacacagctgaagtttgggggtactttctgtgtctgaagtaccatctttccgtcctactctgaactcgctgactggtaccttgaaactgtgtctcaaccagagtgcagagagttgcaggtgtccaggttcacagaaccctcctgaagccttagaaaaatacccaaccttcctgaactgttatctcctgtcctctgacattcatgtgtccctggaacctctctgggtgtgtcatccattggaagcacggtcatttcagttgtagctagcaaggcaaatatctagacagagcatcagtgactcatgaccaggtaagaagaatagaggacacacaaacaagagcaggcagccacatgaagtcggaggcaagattagaatggtgaagctctgagccacagggaggccgggaagctggaagagccaaggaataagactcccctggaacctccagagggagcgtgacactgccaacacctccatttcagaactatggcctgcaaaactatcacagagtttatctcagttgttttaatctattaaagttgtgggcactagttttagtcaccatatgtgactctcacattagcaggcacggatggaatgtcactctgatgccctgtggaagcctgtctacaggaaggttgggaagaagttcagggttcaatggccctgatagcactctggtctttcgggatatgcatttccatggtctttggaccactccatttgcatttgtaagtgcaatagttaggctgtttgtgccacacccttctaacctttgagatttgtgactttgtctgggctgggatggcagagttgtcagggcctgaacttacgcctggcacagtgacacagagtattaataaaaatggcagctgatggtccttagaactctctcccaccaatacttctacctccttgcacacagccctacacagcacctgtgtcacacgagctctatcctttggtgacctgaactcctcttacctgtacctgtcctttccacctggcaaactcttgctcatccccatgtgccctagtttaaatgggctttgtacactctgcatgttgttatctagtgcacaggataaagactgtgtagtaagccctactgcgtgtgcctgtcttatctgaggtgacctgggagcacctctaacacaggactgaatctgtggagtttggcttctgatattctttggcccctccaattctctaatgttcccaagaaagtttgacactaatattaaaaacaagaatagatcagatagcctaagatgtgtgtgctgtagaaggagctgcttaaagttcttgaagtcttggaactgaacccatgtcctctgcaagagcagtaagttttcttaatagttgaatcatccctccactcccaaactttgacagttagttctctttcacaagatatatttgtttattcagtgtgtatgtgtgtgtgtgtatgaacttgtgtacatgcatgtgtatgtttgtgtgcatacttgtgtatgaacatgtatgcatgcatgtgtgtgtttgtgtatgtacttgtgtatgtatatgtgtgcatttgtgtgtgtgcatgtatatatgtgtgcctgagtatatgtgtgtatgtgttcatgtgtatatgcctgtatatatgtgtgtgtgttcctcagtgtgtgtataagtatatgtacatatgtgtaatatgtgtgtacatatatatgtgcatgtatgcacaggtgtgcacatgtgtgcatgtatgcaagaatgcctgagtgtatgtgtacctgagtgtagttatgtgttcaacaatgcagcagtggctgtggaggccagaatagggtattaaattctctggacctggagttatagggagtcaccatgtaagcgctaggaactgaactctggaccttgcaaaagcagcagcattctgaactgctgagccatctctccagccctatgttttgagttttgaaatctaatatctaatctagggtcctccctttctatgtgctaaaaagtaccactgtgttcactgtaccagtggtctgcatgttggaggctgactttggtacccataggcgtatctctctagttatttgctttagtctccaaaggacatgctctttaaaagcatgccctgtttctaagtgagttcgcttttgcagtaatgtaaccaccacttcccagtgcacctggtgagaacacaggaacccacctgctgggttcacacaaagttgactttctggaggtctatgattctgttgcccttttcttgggggacaatttgcccacgagggagggcacacccaggtattctaactattcttcgtctctgtctctcttcacacagggtggccatgggtgactctgtctgtcctgggattcctgtactgctattctcacgtgggcattgcttgggctcagacatacacagttctttaactgtgtatggctgctgggccagctcagcctccaagggacatggcatttcatcctgatctctcattctgagaccatcctcaaaccaccctccactccaggacagtccctgagggaccaccctccactccaggacagtccctgagggaccaccctccactccaggacagtccctgagggaccaccctccactccaggacagtccctgagggaccaccctccactccaggacagtccctgagggaccaccctccactccaggacagtccctgagggactaccttccactcatcttctaatgaagacgcttcattccaggactggcagcttcatcaatcacagtaaatacacaactcaaacttctagctctggagcctcagagatttgtcgcgtcccccccagaagcttcctgacgcacaaggtacagtccagagcagtctcaggttttcctgactatacctgtgatatttgttcccatgaacctgcttgtttttttttttttttcttctctaccaaagcttaggtgtggcagatgtgtgttttgatatggaagtcctggttagggataggcttgccatccttgggatgtctttctgagaaattctgagatactttgatgtctcctttctatgtgctgccctgggggctctggactaaccttcgcatgaatggtccttagacaggggatcagcagaaccatttcacatttcaagtggcccagctagagtgggtgatgtgcagctggggctttacaaagagttctgtaacttgaactttattggagagtccacacagggctgctgctttctgagacttgtagccatggaggaacatggtggttcctctcacagctgttctgcacagaagtggagtttaaaagccagagaataagatgtccacatgcaggtggtgttgcgcaaggcctctggggagagtgacatcccaaggtcccatgacttttactcagtgggttttattgccttattctcatttaaaaaaaaaaaaacagaacctgtttttgctacatagataattctgatttttttgtggtcttattttggatattttttaaataaaaattttgagatctaaacacatgtgtcttgatacttcatccttctagacagctgctgacaagtgtcactgtggttctgtttggctctgggttcgtgtgggaggaggggaggggggaagctctaagttctgaagctctgtgtgtggaatttggagggaatgcttaacactccagctataggaactatgaccctgtgaccgtcaagggaaagatcagctgggctttgtgctgtctcattttctaagtgatagtgtcccgaatcgtgcctaggaatgccagttcaatggaacaggtgcccttgcaaggcacaccctgccatcaggggatcccctttcttcctggctgccatgcttgcaagagagatgttgatggactgggttgggcacactgtgctacctgaacaaagcacagaccagaaggaggcaggtaagctgggcagtagcaaactcagcagctggctgaggaagacgagtcagggagacgcagggcaggcaagtgtgggatgctgggaagttataaggatgtggggggcaaccactgaaatgagtgccatcttttagaacaacagagtaagtatttgtggtcagccagagggagtctggctgaagccttcaagtaaggaaaagactcactgagaaaaaccgtagtgtaaaaatgattgtagtgtctaatagaaaggcaaacctatccccgagactacactggaagagtcagtgagtggttggccataataacccagaagttcattaaaatgatctgattcagtcatggtctcagcagctggctgctgctctctgtgtggattatccggggctctgttgtctcacctttccctgatccctgatgtaacataacagaaaagcacctcccagtgtagtctccacttgctgtagatagatccttgagtccggttcctgggcatcagtcaacttcatccaccaatcagtcatcctcacccaccaggacaacttccgagacagttccggaagcgtgctggataaagtcttgagtccctgtcagtcccaggacctctgatccctgacctagttccatgagcaattgcccagccagtacccaaggagggaagcaagatgcccaatgccaaccaaagtcctgctgttatcataaattcttggaaccacacagaatactgaatggcattaggcttgcaagttgtgagaacatggacttttactgatacctgtagtatctagctgttagcaagagttgtggtaatggtagttagtagtgctccccttacagaacttgagacttttttctttgcttttctaaaaatacaactataggttagctaagtactagaaattaactataatgtttatacttttagcaaacatatcaggatgtatgtatacaataaggttgaattctacttgttaccccaaaggttcctcttgtctctgttgctagttagttacaaaaaccctatttgtttctttgtttgttttaaccattagagattaaagatgcaattaatgttcagcgctttgaaatgagcattagttatttgagattttaaacaatgtcattattagttttaccatgcccttctgtaatgtaatgaaataggggactgaaggaatgttctcaaatacaccatgttctgatgtggtcagtgaggttctccatgtcctgactttggtttcacataatggatctcgtcccagaattaagtcccactgtctgctttttggactttgatggtcactggatcttaaataagacacaggatggcagtcctgtggagtctgactcagtgcctgtgggataacactgagtaggactgcttgaggcagctcaatagctctgcaaactatagtgaagtagggtgagaacccagtgctgttgacagtcattcaggaaacactgggttgtgggttttgctgtcttttcaaaagtagggaaaacattaatgtactttattcaaaatccatgtcaaattgttcaagatgaaaaccatcactttagaacgggaggtgtgttaaggcaaatgctacgatttgaatgtgggttgtcaactcatattgaaacttgatgcctttgtgatgggagataaggactttgttgtggtttggctgtgaaggacccagatcttcaagaccaagatcttagaggcagcctctcaggctcattgcagaggtaaaacttcagagaacatgctgtggtcactccgtaaggagcacttagacatgaagcatgctgtctccccaatccattataggtcatactgactgtcagcttgacaccgtctaggattccctagattacaggatctctgggtctgtctctgaggggttgctagatcaggaatccctggcctggtgggtggactgcaccctcaagccatgcgctaatataaatcctctctgcaagttgcttggtctggtactttaccacagtatcatggaaactgatggatgcaaggcaccatccacatcagagcttcccacatattttttttaaaaaagatttattgttatgttctgcatgccatgtgtgtgcaggtgcctcagaagccagaagagggtgttggatcacctggagctggcattccaggtggttggaagtcagccactcatgggaactgagcagagaacagccggaaggagagaaagcatctcactggatgacataagtatgtaaggaaaggcaaacacaggtatcacatataaaatagtttattaccataataaataaaattaaacttttttttttttacaaatatcatttgtgcttgtttaaaaatgtcaagaaagggggtatcatccatggagtgcccacatgttctccacatccgtacagccacacaggggagctcttggcagcatcctcagctgaccacaaaaatagcctcagctcatttgcacctgtttattcatgctcattcggacagaggaaaaagaaacaacaacaacaacaacaaaaaccccaataaaggatttggcaggatttgatggagaatgtttgtatgagaagcctcaggatgacgaactgctcatgagtataaatgtccttgcaacttggatggtggacagtctccaactgatgctgaaatacagtgtctgaatattaagaggctacattcattggggtgggggtggtgggtgctgcattcttaccaagaagcagtctgacttctgaaagttgagctgtgaacttctcaaggactaataggtcgatgggatgactcagaagtcacaggtataaagagtcagtagctctaaggaaggtcaagtggcaggtggagatgcccccaccaggtctggcacctgcaggaattcaagacctcctttaaaggttctgatacactagtgtgaagactgacgttttacttgagactcacttaagcttcaggtaagttcacattgattcctttgaactgtgtgagaggtggcaacatgtctccacaccaacaccttggatgtaaaatggttctcttttggaagcttagggtcggtgcttcaaggactctgaggactcttccaggtggagggcaccggagctggtgaagatagtttttattgaagcgagtaagaaggcagtacatgaagcagcaacaaagacagggacatttagggaggagagggcatctgagggccagagcaaacctaggcaggcctcttttctaagccacacaagatggggtaaaaaggggtaccaacacctcaatggcagttagacttccactcaagggtcttaaggctaaacagctttatggcaaaataaaatacaattagttgcgtgcacatctatgatttgtaccttcaccagggttcccgagaggccccggagtgtacctgtgagatgtcagtgtcacacagagatgaaggtctgtctgcctctgactggtatttctgaagtgttcactcaggccctgttccaacttggacacacctagcatttggcttaacattctctccttccactgaaggattcagagactgacgccagcaggtggtggggtggtactgtttctaccccatgtccgaccatccttgctgttgaagcagcagggactccttgaggtggaggctaaaacagggccttggaaccagatagcaagaaatcaaatcgagaaatgtgaatccagagcttgctggggagccagaggtaccattcaatggcagagctcttccctagcataagccagggcctaactttgacctccagcaccaaaaacaaagccaagcgtggcgggaagctgctacaacaggcatgggagtcaaaacacttgagccccgctccagcagtaagcagagaagtggggttggccatgccgagatcatagcaatgcaaaagccgccacatgccccatgttggagccttgccattgccctgggatgacatggctgacgaggcatactcaccaaagccagaacatctactgccattttggttctgatacccacactactgcacaccttcaggaagagagcaatccatccaagtctcttgtcaggatagccactgggaaattgtacttcactatggctggcattcacagtagctcgtttagagagaccaagtggccagcacttactagacagtagcgcaccacatcgtgtgtttgccacacccccccgccccccaaaagaatcttttgtctgaaatttcagtgttcagtctgcacatggcaaattttgtttcccagtctctccctagccaccagataactgctaaagcaggaaggttcaggctgtgggtatctgttccctgtggtccttgctcagaacttgcctccagcccagtgcatgccatgacagtaaagagacatgggttggctcattgaaaatttgtttcagagaaggcaatcctagcaaaaccactgtagaaatggggaaagctaaaagccactgtcaggtgttcttcactatcatctgcaggaactgaagccctagacgcctaggaccccaaggtgagcagagacagggtgtggacctccatctaatgggacttcagcctgtgcatcgaccccagagagtagcctgaagctttatctgtctcctgtcacaaggatgagcttggctgcaccgccacctcagacagagttcagtcaaggagcaatggggcctctgctctgagggtccttaaatcccagcgagttccagaaagcttcatgtgtgtacacccttgactttccagggctttccagcctgtacagacagccatgcatcaagtcccagcaagtgccatggtcaccaatcagaacaatgtctttggtagggcaggtttccaatgtcaggctcctgagagaggctgagattctgaatcacaacagccaagcaatgctaagcagaggtgcccgtgtcacttgctgtcctgactgcagagccgagtttccaggcttactggcagagttacgcccctgacatctctccaggtgtgcacctgagccagctcccctgtcctgtctgatgccgttgaaacaacaccaaacagcatgtcctcaagtgatcaaggcagcgagtgtccctgagcaccacgatgtgggaatttgaatgacacagagatggccctgggaccatggctcctgagcccccaccttccccaagactacagttccaccgtcacctccccccaccccagcttgttactgagatattttgaaaaccagtgcttcatggtcctgccattatttttagtgtaggaaataggttggctttcaaataaggctaagtgtggctcccatgtgtcctctaatgaccccatgcactggacagaaatccccatgagactcaaaggagaaacctagtacttgctacaatcatttttttttttgaggttgtatgtgtatctgctttgttaggaaaacaatgctgagtgcctgccccttcctgtcggtgccctacaccctgaggaaagccatagacaagcctggaaaaaggtcagtcgagggagacggagagaagctcatatgtcatgaggcctataagatggtgcagctccagagggtcccctggggtctggagcttccacgtcaactgtccacaagagcaggctgtggaccattcaacaagatcccactcgaagccaagggcctgctccagcccctactcttgcctcacctcttctgggcaaggaaacctgaggggcccagcccatgtgtccatggcacagcacctgatgctccacctctactgtcagagcagaaagtctctccagtccgtcaagctccccttatcacgagtttgttacaaatgatgaaagtagaaaaacaggtggtgatgtcagacacagctgggggtggtgaatacccagaagtccctgtgcctgtggtggtcttcaggggtcttggtaaagaagcctggtgtggtctatttctgagaggttctcagggctctcccaccagtctctacatggccgctgccctgcaaatatcacatccgtaaaacatgttagaggaaatgctctttagatggagagcgtgccccttcttcaacaactgtcagtggctgttccaacacagctgccatcttgcagggtggggtgcctggccatgttccctcttatgttttccagagaccatgcaggcacacccaagccacttggtctgattttgacttcctgtcagaaaaagcccagtatgaaagttgttggtcatgtgtttggtgttgtgggtagtgtcaggggcagggtgaggaggcaggcttttgtctttgatttgtttgtttgtttgtttgtgtgttttgaaatgatcctctcagcttgctccaaaaatgtctctgtctgactctggggactggggcctggagatctcacccgtctcctgaggagattgggcggaccctctggacattagtatcctgagtatctcagacagctgcttctcaatggaggtcattttggcattcaaggccttgatatcctccttcagctcatatttcacctccagcactgtggcctgcagcgtctgctcagggatggggtagaaagaatgcttgacctcagccaagatggggctccggtcctgaggactcctggtctcacccacattgtccaagcgcaggtcgctcttggtgattccgctgtcacaggagtctgtcttcttcagcgtggcctcacccggtgcctttgtcctctcgggcagcgtctccatggactctgccttggacaccttgttccaatcctcaccctttccacaggcatctttgaaacgggcccagcctttgcgcttggcagggtcacagctgactgccttgggacctaggcactcagatccgggggcatgcagcttggcgtggtctgacacggtggaggtggtggccgcctggaaggacacaggcgtggcggggctctcacgcaccgtgaccacactggccttcaccaggctgtggttggctgaggtatggtccgtgagggcattgcccttttctacatccaggtcatccaggtcccggccccctctctcggctgccagcctggcttctttctgctggcggaacctttggaagagtcttctgacggggtggtcaggaggcaggataaggggggcctcgttcttccgtttcatcctctcctcctcttctcgtttcacgtcgctgatcttccggaacacaatctggatggagagaggacaccgtgtgttagctggaagaagctccggaggtcaagtctgtcaatgtcaagcaccatccaacaagggctgcagcccacagcacattcacagccctgcactgacatcaccacctttcttctgtcctgcttctccaacatcagagaatcagcccttgctgctaccctctcagaaggagcaaagcccaccttcattcaggaggctgactgccaaagtgcatactccggggacatctagtaaattagaaaaccactttccttccctagctcagacctcttcagagagaatggccttgcgtcactaggataaaaagccccagagattctgatcaccgaagtcccaccatctttagtctaaactgcactacagggtaaaacagttaacttatatcctcatggggctactgtggtgctatccacagatcttgtgggcagctatggcacaattacaagctagtttcctttggttgaccttgaacccaagcttgccatataaccataacattcaacgctcagtcagtacctgcagttcacagacattttttttgtgttatctcttgtatcctatattttgaggccactgggacacacaacatcccaatttagaagtgatgaaagtgaggcccagagtgtctgaatatcacacaatactctaagttgtctgtattgatcttgttccttaaccactaaacccctgatctgttggatagacaccatgtcactgaagatgatgataccacctcattgtcagcccctaaagaccaatcgaccatacatagtggctcatgtcctgctgggttagcagctgagcctgaggactctgaccctgtgggaagcacttgagccaggctgtctccttcctcggagtgctgacgtgaggtgaagagaagctgcttctccatatcttcacctggaacccctgtgccctgtgcaggaccctaggccagctgtaaatctgttctaggatgtgtcacaggacttgctaaggcatgttgcagcatggcaggagcgcggcctttggggtcaaacaaagtggcttaagtcccttgccatgtgccctcagatgtgtgtcttacttccatatattagcatcttcactaaagtaggagacgcctacttatcaaactggaccgactgtgataccattcaattttgttgtccccgttccttcaaggacctaggtgcacatgaaacaccctgacctgcctcctccaagggctctggcccagcattctctgatgacagcactcttcacatgtgacctaaagaacagtttgccagactcaacatgaaggatcctaacaaacacagagagcttggcactagtgatcatagctctccatgtccctcgatgctgcccgtgccatgacttcttggtccatgcatctgtcacttggcttcacatcaaggtcgatggcaggcaggtgggtgtcacaccattaggctacttgcacttagcctgcagcactccccagtgcactgggcagccctcccatttattctcaagcttgtcctcgccttcactagctgtcatgacagtctctttgtcccttcctcagccctgcctcttgagctgcctagatctgggtacaggccaggaactcagaggaatcctatccactctagaagaaccaagaaaacccagctaagggcatccaaagacagagggatggttataggagagcaaccattaccctttccctgtgcactagatgggatggatggcggtccctcaactttgtgcctctgcacaggttttggtcaaatttgtaaatctaaggcctagagcaagctgtcctcctgtatagagcctgtcccatccccttaagctcaaccaatcctctcaccttgcagctctcacgtgctttgtgctcacccaactctgtaccttactctgaatcttgcacacatctttcttagacatggagacaacttttctgaagagagcacagacagtggctggatgacaaggaagcagatgagaaaatggtgccgctggagttaactaaggtcctaaatgtctacattgtatcaattcctaacaggcctccctgctacatggctaagtgagctaagctgagttgggtttaggtcttcctgaacaagacacaagttatttggatctgtctctctccccagtgaaagccctaagggcttagagcaggattctgcatgtaacagtatctttgactttaagtttctttcttatcacctgacctaagagaacagcccttgtctgttttgtccaagattagctctttaggagcaactaggatgctctcaattcattcatttagtctacaaaattctcagtttgtagaataaatggataaaaaggggtgatactggttaatgaactagaaggagaacttctctgacctggaaagatgacatcactgaagtcatagtatcattacaggagagcgttggctcagaacattactaccctgtgcagaaagtcaagggcagttcttgagggttcaggtgagcaattttctaggacagtggtggggagtcctgctgatatcagaaaggcatctcacaactcaccctgggaggttccacatcagtgttcagataggtctttcagggcttaacagactccatagtaagtgtttgcaggaagggtggccatgttgtgctcttcacctaattggccctgactcagagtctaggactgacccagacaacatgtaaaaggtggtctgggttgccttagcatgccagtcagagcctctacttgggattgggtcttcaactccatacttcctgtctggaaacctcctggcctcttccacagtgtcctcgtataaaggccagtggcttgtccatttgcataccccatccctactaacaggcaggggaaccaatgtacagcccttcagatagaagcaccgctcatccaccccagagacaaggccaacgaggtccttcagggctgatgggtgctggccgctctgctgatgtgcagctaagggcacgttttcatttcagctgctgctttgaagtcattagtgggatctgtgccagcagcaaccatgactgtgcattttgacgagcattttagatagagcagacagggctggctgcgtgtgactggtaacaacgaggcccaggttaccaggctcagcgctcctccatctgtccagagacactcacagttccccaaggcaagaatgcgcctcagcaatggtggacatgacctgtaactcaaaataaccttctgtgtagatgaggctctggtaggaagcatggctacccagcactcacagtgttccacgaggcttttaaaatgctcttcggggggtgcagtttcagtctgtgctttgttgcaggactttttgaacccgagtgtgcaaatgtaccttatgtatgtctaagaggaaaaatgtattcagattttctcttatctagatttatttatttattttgtgtgtatgggtgttttgcctgcatgtatacctgtgtacatggtgcatgcagtggccaggagttcagaaaaggtagtagatcctctggaactggagccacaggtgatggccaccacacgggtattgaaaatagagcctgtgtcctgtgaagagtagtcagccttctttcctacagagccacccccgaccccttattttgagcttcttagtccatttcctcagctcctcttttaaatgcgtgtttcccagaatttcctccatctatggggtggggtatttgtatagtttcctgtcccaggctgcatgtctctcaatattgttaagccttggagttgaggatgaggggggtctccctgaagggtgggtctgcgttgatccaaactctacaactcagctaatacagcttgcatgatatggtcctagctcaactctcccgcccctcctatcacacatcccccctggcgcttcagtttgccttcactgtgatctccaagaccggactgagcagtcatttcctccaacaaccttccctgaactctccccacccaacgttggcaaacccaccctgctggtgcctctcagcaggcagccacacgagtgtttccattggtcactgcaacccatggtgagaaaccctttcttagctggtcatgttgttctgactgaagctctctcaaggcagacgcactcatgtttcccatctgtactaccatgcccagcacctatagcactcaataagtgattgctaagtcaacacacatggcagtgcctgagttaggaccattcccagttctgaagttcatgttctatgtaggatgttatccacaggtcccctaaaatatgcttctgatgtgtgtgatccagtggggaaagaggagagaccaggtggatttattctatgtgcagcatgtgggttcctgatgtgaagtgtaatgtgtaaactcctgagggacatccatggttatcctttgtcatttcagaccccactcaacagactctgtcgtctccatcggctggttttcatactcttacatgacctcaaggtgtgtgctggggaggggacttaggagcactaagacgatttttctttttgcaatgaggacaactgttcttgaatttcccatttgtatgaactttgctcttccttgagaagagcatacagtttcatggacagggactgctcggggagtttggtaatcagagaccaaatgcccaagctaatgtccctgaacctgtccccccaccccctgctgactcctcaggccccatcaattcaacaccaagcttctctctgtgggtttcattacaggaattcaagaaaagtttccatggccctagaaattactttggaaactacttaataacttcaaacttcccctgtaaaggtagtcagtggttttaataatttgtcctatgtaagtatgtgacagcttacatactaagctatagtatgctccagctcaggccacatatttaagagtggtggtttgtgtccccctctataggctccagtgtctaaacattggttctcagtggcactgtttggggggaaggctttgagagcttaaacctttgccctacttctggattctctgtcactcatgcttgtacctgatgactgagcacctagctttctgctctggcctccttgtttgccaccagctgccattccctgctacagtgaactctttatctctctgaaactgtgagccaaggctgactttctccaaaagtctcctttggttgtgatgttttctcacaaaaacagaaaagcaactgacatatacagcgtttcctgtgaggtgtgcatgcaagaatcaccactgtcgtgtgataagggagctgaattgctggcctctccagcgtcacatgggcagttgaaagcaggactctagggtgtagcctgtgctctttccttcccaagaaataaacttagagagttaagagagagagaggtgctggggactatgcagagatccataccattcactggaaggacccagctatggagactggccacccctctgctggcagtgatgggcatgtccaaatccccgctgggcccagccagagtccttctagctcacaggagcatgttctttcttccctgataaggcatgggaggcccaagctgaattctgtacatcccaagtcttcctaatattttgggaaaccgaggaagtcctcagagcagggatggccactgtgtaccattcatgcatgatctgcatccctctgggactgcacggagccatggcctgagcacaggagctcattaataaggagttattattgagctgaacagagtgacacgcagatccttaagctgcaaggcttcttgagcaactatttttaactttatttgaaaacaaatcaacctcttgtgatctgaggtgagtcaggacaatcgaccacctcttctggttgcctccaaggagggtctacagggctagagagatggagaagttcataaattgctctcacataaataagaggatccaggttcaatccccagcacccacataaaaagactggatataatggtgcctggctgtaaatcctcagcttggaagtagagagtcattctaaacaactggcaagctctgagttcaatgaaagactatattttaagaaaaattaggtggagattcctgtatgcatatgcacacacacatgcatgttaacctaaatatatggacttacacatgaacatgcacacgcataaattatctgtacatatatacatacacatatgtgtgagaaagatctagccactcattgatctgacacccactgaagtgacagcaaagactaggtcaaagagagcaggcgacgcctcaaggtcactgttcaagagggtcccagccatacaaagagaggaaaagcaagcccaggagagcagtagattcctggagccttgacaccacgaggatgattaggggcatacagttgtggaatgataggtaaaacccagtcatttctcagtgccttccacgagtaggctgtgtgcttagtttttttgttttttgttttttaaatcaactcaacacaagctagtgtcatctgtgaagagaggctctcatttgggaaaatgcccccataagattggcctgcaggcaagcctgggacattttcttggttagtgcttaaaagatggggcccagcccactgtgggcagagccacctctaggcatgtgggcctcagaagtataagaaagcaaactgagcaagccaagaggagcaagcccataagcagcaagcactccttcatggtttctgctttagcagttccagcctccaggtccctgtcctgcttgagttcaggccttggctctcctcagtgatgaactgtgacatggaagtgtgatcctaacaaccccttccctcactaagatcccattggtcagtgttctatcacagcaagagaaagcaaacaggaatggcctgtggtatgactcataggaaaccatgacaaacctaatgaaagttatcctgttctctcctgaatcctgatgcatgtccccagcatgaaatgctcagaggggaacagaaagggcacaggttggtgtatccctaactctgtgtgacctgggaaaagttatgcccttggtgggattggctggatgattcttaaacaaaggtgtacctcagaagcacttgcagtagtgtgtgtacagaatgaaagtggcctgtgacgggtgaagagcaggctacataccaagctctcagaaacagcatctgagaggctaggattgatgcctgctgaggtctctaacattctgatgtcttgtgtgtgagtggccacagcccttccccaggacactgtgcacctctctgcctgcaatgctcctaaaacttgctgtgtgccacctgggactttcatggtgtgtgtgtgtgtgtgtgtgtgtgtgtgtgtgtgtgtgtgtgtattttccaatgaatgtcccagcccctggtcaccctgaaggatgactggacaggctggccagttcttgtaataatttttccttaaactttgaaaagccagcttgatctctaaagtagaacacccagggctcaggagtacacagtgactacttcctgtctgtggggacgctcccacacaggctatctttactttgtaggtggctttttccaacacagagcagcagagagcccagactcctttctcccctggggccagggccagggccagtctggtgctggttcaggctatactgagccacagaggcccctcagcttacaggcctgggtgacgaagctctcctcatgatttccctagccacaagtcctccatcactaaccctgcttggctttataacagagaactatgaagacttgcaaactgaactattgaagaacttaaaatatgtacaaactataaaccagctgataagaaacacttggctggactctgagtttgaaaaagtcacttctttaccccgctcaactcattacagaatcaaatgctatggcaacagcctcgggaatattttattgcacagaactatgctctgagcctcagggagcagaggagataccagagagactgaggcagcccaggtcagccaatgttctcagagctcagactgtagtctcaggacctggggccagaggataaagcacagcctcgccttccagggttgccaggatgcagaagtcagatgatgagcgaatagctaaagcattgagcaggctgggggaagggagagtcctgaagtcagcattagtggtgggcagctgcatgagtaatgctctaggtatcattcagaagggagcatggtccccaagtctcagtgtccttatcttctagggatatcactgggattaagtgggatacttgcttgtgatggtttgtatactcagaccagggagtgacactattaaaagatgtggccttgttggagtaagtgtgtcactgtgggtgttggctttaagaccactcatcctagctgcctgaaagccagtattctcttagcagccttcagatgaagaaggagaactctcagcttctcctgcaccatgcctacctggatgctgctatgttcctgccttgatgacaatggactgaacttctgaacctgtaagctagcctcaattaaatgtccttttaag

SEQ ID NO: 360 - DNA, 1818 bp, Mus Musculus
tggagcctgaggttctggtgggaccctgtgtaatgattcggctccagtaaatgtacagagccctggccaatcctgcgttcgggaacccgggcacaacatctcaggccaggcgctcacccccgcggcctctgacccgcgctgtgctcgcgagtccctcccgggccgcggctcagcgcggcggggtgcagggacgccttctctcccgctcgcccagctctgcacactgcgatccagaaactctccacactacactgggaagcagagactccagctatgctgcccgggtgggaactgactctctgcctgcttgtttccttgggtttccacttccgctctttctatgaagtttacaaagtctccagagagcatgaagaggaactggatcaagaatttgagctggagatggacactctatttggaggactgaagaaggacccgactgattttgagtggaacttctggatggaatgggggaagcggaggctggtgtggctcttcattggccatatggctgtgtctcagttggccacgttactcacaaagaagcacagaccctggattgtcatggtctatggaatgtgggcctgctggtgtgtgctgggggcgccaggcgtggtcatggtccttctccacagcaccatcgcgttctgcgtggctcagttccgatccgtgctcctgtcctggctgtgttctctccttctgctctccaccctaaggctgcaaagtgtggaggaagttaagagaaggtggtacaagacagagaacgagtattacctgctccagtttacgctcactgttcgctgcctgtactacaccagcttcagcctggagctgtgccggcagcctccgtctgcacaacctactccatctgcgcaaggtgcctcccattcctacccgtggctgctgacctacgtcttctattatcccgtcttccacaacgggcccatccttaacttcccggagttcttcagacagatgcagcagccagagctcaactctctgcagcacagcctctgcattgtagccaagggcctgggtcgtctgctctgctggtggtggctggctgaactgatggtacacctcatgtacatgcatgccctctacagcagcgcccccctcctggagagcgtttcctgctggaccttaggaggactggcgctggcccaagtgctcttcttctatgtgaagtacctggtgctctttggtgtcccggctctgctcatgcgcctggatggactcacgccaccacctcttccccgctgcgtgagcaccatgttcagttttaccgggatgtggaggtattttgatgttggactacacaatttcttaatcaggtatgtgtacatcccactgggcgggtcccagcatggcctgttggggacactgctttctactgcaacaacgtttgcgttcgtgagctactggcatggtagctatgaggacctctggtgctgggcagcgctcaactggctgggagtcactgtggagagtggggtccggaggctgctagagacaccctgtgtccgggagactttggcccggcacctctccccacaagcccaccatcgactgcacgctctgcttgccgcctgctctacctccatgctcatcctcttcaacctggtgttcctcgggggaattcaagttgggaaaacctactggaacaggatcttcctgcaagcagccttcagatgaagaaggagaactctcagcttctcctgcaccatgcctacctggatgctgctatgttcctgccttgatgacaatggactgaacttctgaacctgtaagctagcctcaattaaatgtccttttaag

SEQ ID NO: 361 - protein, 473 aa, Mus Musculus
MLPGWELTLCLLVSLGFHFRSFYEVYKVSREHEEELDQEFELEMDTLFGGLKKDPTDFEWNFWMEWGKRRLVWLFIGHMAVSQLATLLTKKHRPWIVMVYGMWACWCVLGAPGVVMVLLHSTIAFCVAQFRSVLLSWLCSLLLLSTLRLQSVEEVKRRWYKTENEYYLLQFTLTVRCLYYTSFSLELCRQPPSAQPTPSAQGASHSYPWLLTYVFYYPVFHNGPILNFPEFFRQMQQPELNSLQHSLCIVAKGLGRLLCWWWLAELMVHLMYMHALYSSAPLLESVSCWTLGGLALAQVLFFYVKYLVLFGVPALLMRLDGLTPPPLPRCVSTMFSFTGMWRYFDVGLHNFLIRYVYIPLGGSQHGLLGTLLSTATTFAFVSYWHGSYEDLWCWAALNWLGVTVESGVRRLLETPCVRETLARHLSPQAHHRLHALLAACSTSMLILFNLVFLGGIQVGKTYWNRIFLQAAFR

SEQ ID NO: 362 - DNA, 2126 bp, Mus Musculus
cggaagaatcctggagcctgaggttctggtgggaccctgtgtaatgattcggctccagtaaatgtacagagccctggccaatcctgcgttcgggaacccgggcacaacatctcaggccaggcgctcacccccgcggcctctgacccgcgctgtgctcgcgagtccctcccgggccgcggctcagcgcggcggggtgcagggacgccttctctcccgctcgcccagctctgcacactgcgatccagaaactctccacactacactgggaagcagagactccagctatgctgcccgggtgggaactgactctctgcctgcttgtttccttgggtttccacttccgctctttctatgaagtttacaaagtctccagagagcatgaagaggaactggatcaagaatttgagctggagatggacactctatttggaggactgaagaaggacccgactgattttgagtggaacttctggatggaatgggggaagcggaggctggtgtggctcttcattggccatatggctgtgtctcagttggccacgttactcacaaagaagcacagaccctggattgtcatggtctatggaatgtgggcctgctggtgtgtgctgggggcgccaggcgtggtcatggtccttctccacagcaccatcgcgttctgcgtggctcagttccgatccgtgctcctgtcctggctgtgttctctccttctgctctccaccctaaggctgcaaagtgtggaggaagttaagagaaggtggtacaagacagagaacgagtattacctgctccagtttacgctcactgttcgctgcctgtactacaccagcttcagcctggagctgtgccggcagcctccgtctgcacaacctactccatctgcgcaaggtgcctcccattcctacccgtggctgctgacctacgtcttctattatcccgtcttccacaacgggcccatccttaacttcccggagttcttcagacagatgcagcagccagagctcaactctctgcagcacagcctctgcattgtagccaagggcctgggtcgtctgctctgctggtggtggctggctgaactgatggtacacctcatgtacatgcatgccctctacagcagcgcccccctcctggagagcgtttcctgctggaccttaggaggactggcgctggcccaagtgctcttcttctatgtgaagtacctggtgctctttggtgtcccggctctgctcatgcgcctggatggactcacgccaccacctcttccccgctgcgtgagcaccatgttcagttttaccgggatgtggaggtattttgatgttggactacacaatttcttaatcaggtatgtgtacatcccactgggcgggtcccagcatggcctgttggggacactgctttctactgcaacaacgtttgcgttcgtgagctactggcatggtagctatgaggacctctggtgctgggcagcgctcaactggctgggagtcactgtggagagtggggtccggaggctgctagagacaccctgtgtccgggagactttggcccggcacctctccccacaagcccaccatcgactgcacgctctgcttgccgcctgctctacctccatgctcatcctcttcaacctggtgttcctcgggggaattcaagttgggaaaacctactggaacaggatcttcctgcaagggtggccatgggtgactctgtctgtcctgggattcctgtactgctattctcacgtgggcattgcttgggctcagacatacacagttctttaactgtgtatggctgctgggccagctcagcctccaagggacatggcatttcatcctgatctctcattctgagaccatcctcaaaccaccctccactccaggacagtccctgagggaccaccctccactccaggacagtccctgagggaccaccctccactccaggacagtccctgagggaccaccctccactccaggacagtccctgagggaccaccctccactccaggacagtccctgagggaccaccctccactccaggacagtccctgagggactaccttccactcatcttctaatgaagacgcttcattccaggactggcagcttcatcaatcacagtaa

SEQ ID NO: 363 - protein, 499 aa, Mus Musculus
MLPGWELTLCLLVSLGFHFRSFYEVYKVSREHEEELDQEFELEMDTLFGGLKKDPTDFEWNFWMEWGKRRLVWLFIGHMAVSQLATLLTKKHRPWIVMVYGMWACWCVLGAPGVVMVLLHSTIAFCVAQFRSVLLSWLCSLLLLSTLRLQSVEEVKRRWYKTENEYYLLQFTLTVRCLYYTSFSLELCRQPPSAQPTPSAQGASHSYPWLLTYVFYYPVFHNGPILNFPEFFRQMQQPELNSLQHSLCIVAKGLGRLLCWWWLAELMVHLMYMHALYSSAPLLESVSCWTLGGLALAQVLFFYVKYLVLFGVPALLMRLDGLTPPPLPRCVSTMFSFTGMWRYFDVGLHNFLIRYVYIPLGGSQHGLLGTLLSTATTFAFVSYWHGSYEDLWCWAALNWLGVTVESGVRRLLETPCVRETLARHLSPQAHHRLHALLAACSTSMLILFNLVFLGGIQVGKTYWNRIFLQGWPWVTLSVLGFLYCYSHVGIAWAQTYTVL
